(19) United States
(12) Patent Application Publication
(10) Pub. No.: US 2011/0281750 A1
(43) Pub. Date: Nov. 17, 2011

(54) Identifying High Risk Clinically Isolated Syndrome Patients

(75) Inventors: Jean-Christophe Corvol, Paris (FR); Daniel Pelletier, Novato, CA (US); Stephen L. Hauser, San Francisco, CA (US); Jorge R. Oksenberg, Palo Alto, CA (US); Sergio Baranzini, Brisbane, CA (US)

(73) Assignee: The Regents of the University of California, a California Corporation, Oakland, CA (US)

(21) Appl. No.: 13/055,684

(22) PCT Filed: Jul. 24, 2009
(86) PCT No.: PCT/US2009/051750

§ 371 Date: Apr. 14, 2011

Related U.S. Application Data
(60) Provisional application No. 61/083,505, filed on Jul. 24, 2008.
(60) Provisional application No. 61/103,215, filed on Oct. 6, 2008.
(60) Provisional application No. 61/108,469, filed on Oct. 24, 2008.

(51) Int. Cl. C12Q 1/68; G01N 21/64; C40B 30/04

(52) U.S. Cl. 506/9; 435/6.11; 435/6.17; 435/6.18; 435/6.12; 435/7.92

(57) ABSTRACT

Disclosed herein are methods and kits for identifying clinically isolated syndrome (CIS) patients at high risk of developing multiple sclerosis (MS).

### CROSS-REFERENCES TO RELATED APPLICATIONS

[0001] This application claims the benefit of U.S. Provisional Application No. 61/083,505, filed Jul. 24, 2008, U.S. Provisional Application No. 61/103,215, filed Oct. 6, 2008, and U.S. Provisional Application No. 61/108,469, filed Oct. 24, 2008, all of which are incorporated herein by reference in their entireties and for all purposes.

### STATEMENT AS TO RIGHTS TO INVENTIONS MADE UNDER FEDERALLY SPONSORED RESEARCH AND DEVELOPMENT

[0002] The invention was supported, in whole or in part, by a grant from the National Institutes of Health (2R01NS026799). The Government has certain rights in the invention.

### BACKGROUND OF THE INVENTION

[0003] Multiple sclerosis (MS) is a common disabling neurologic disease of young adults (1). Most patients with MS initially present with a clinically isolated syndrome (CIS) due to an inflammatory demyelinating insult in the central nervous system (CNS). Approximately one third of CIS patients will progress to clinically definite MS (CDMS) within 1 year after diagnosis and about half will do so after 2 years (2, 3). Although MRI assessment is routinely used to monitor and forecast conversion into MS, its specificity remains moderate (3). It is estimated that about 10% of CIS patients will remain free of further demyelinating attacks and neurological complications even in the presence of radiological evidence of white matter lesions (4). Although structural neuro-imaging studies are invaluable in the diagnosis and clinical surveillance of MS (3, 5), there is currently no biological marker that accurately predicts MS conversion in CIS patients. Individualized early prognosis and prediction of CDMS would be of substantial value because patients at high risk for rapid progression could be offered disease-modifying therapy, an approach shown to be beneficial in early MS (2).

[0004] The present invention meets these and other needs in the art.

### BRIEF SUMMARY OF THE INVENTION

[0005] The present invention provides methods and kits for identifying clinically isolated syndrome (CIS) patients at high risk of developing multiple sclerosis (MS).

[0006] In one aspect, a method is provided for identifying a patient with clinically isolated syndrome (CIS) at high risk of developing multiple sclerosis (MS). The method includes detecting the level of expression of a marker gene within the patient. The marker gene is a marker gene set forth in Table 18, Table 19, Table 1A, Table 2, Table 4, Table 8, or Table 13, or the marker gene includes a nucleic acid sequence of at least 10 nucleotides in length and at least 90% (e.g., 91%, 92%, 93%, 94%, 95%, 96%, 97%, 98%, 99%, or 100%) identity with a contiguous portion of one of SEQ ID NO:1 to SEQ ID NO:1021. The level of expression of the marker gene is then compared to a standard control whereby a differential expression of the marker gene relative to the standard control indicates that the patient is at high risk of developing multiple sclerosis.

[0007] In another aspect, a method is provided for identifying a patient with clinically isolated syndrome (CIS) at high risk of developing multiple sclerosis (MS). The method includes detecting the level of expression of a plurality (e.g. a panel or group) of marker genes within the patient. The plurality of marker genes are all or a portion of marker genes listed in Table 18, Table 19, Table 1A, Table 2, Table 4, Table 8, or Table 13, or the plurality of marker genes comprise a nucleic acid of at least 10 nucleotides in length and at least 90% identity with a contiguous region of all or a portion of marker gene sequences listed in Table 18, Table 19, Table 1A, Table 2, Table 4, Table 8, or Table 13. The marker gene sequences listed in Table 18, Table 19, Table 1A, Table 2, Table 4, Table 8, or Table 13 are referenced as SEQ ID numbers. In some embodiments, the plurality of marker genes are all or a portion of marker genes listed in one of Table 18, Table 19, Table 1A, Table 2, Table 4, Table 8, or Table 13, or the plurality of marker genes comprise a nucleic acid of at least 10 nucleotides in length and at least 90% identity with a contiguous region of all or a portion of marker gene sequences listed in one of Table 18, Table 19, Table 1A, Table 2, Table 4, Table 8, or Table 13. In other embodiments, the plurality of marker genes are all marker genes listed in one of Table 18, Table 19, Table 1A, Table 2, Table 4, Table 8, or Table 13, or the plurality of marker genes comprise a nucleic acid of at least 10 nucleotides in length and at least 90% identity with a contiguous region of all marker gene sequences listed in one of Table 18, Table 19, Table 1A, Table 2, Table 4, Table 8, or Table 13. The level of expression of the marker gene to a standard control is compared whereby a differential expression of the marker gene relative to the standard control indicates that the patient is at high risk of developing multiple sclerosis.

[0008] In another aspect, a kit is provided for use in identifying a patient with clinically isolated syndrome (CIS) at high risk of developing multiple sclerosis (MS). The kit includes (i) a nucleic acid sequence having at least 90%, 91%, 92%, 93%, 94%, 95%, 96%, 97%, 98%, 99%, or 100% identity over at least a 10 or 20 nucleotide continuous region with one or more nucleic acids within a marker gene identified in Table 18, Table 19, Table 1A, Table 2, Table 4, Table 8, and/or Table 13, (ii) a nucleic acid sequence having at least 90%, 91%, 92%, 93%, 94%, 95%, 96%, 97%, 98%, 99%, or 100% identity over at least a 10 or 20 nucleotide continuous region with a target sequence to which the probe set identified in Table 18, Table 19, Table 1A, Table 2, Table 4, Table 8 and/or Table 13 is designed to interrogate, or (iii) a nucleic acid complimentary to the nucleic acids set forth in (i) or (ii) above. In some embodiments, the kit also includes an electronic device or computer software capable of comparing a marker gene expression level from the patient to a standard control thereby indicating whether the patient is at high risk of developing multiple sclerosis.

### BRIEF DESCRIPTION OF THE DRAWINGS

[0009] FIG. 1. Molecular signature in CD4+ cells segregates CIS patients from controls. A. Three dimensional plot of the first 3 principal components computed from expression values of the 1,718 genes with the highest variance across all samples. B. Hierarchical clustering of expression values from the same genes and samples as in A. C. Gene ontology (GO) categories significantly enriched in CIS patients at baseline. D. A representative model for the prediction of the 4 CIS groups using the Integrated Bayesian Inference System (IBIS).

[0010] FIG. 2. Clinical and radiological characteristics of the 4 CIS groups. A. Clinical and MRI characteristics of the 4 CIS groups defined by gene expression. B. Hierarchical clustering of differences (delta) between measurements at baseline and 12 months later of brain parenchyma (nBPV), grey matter (nGMV), and white matter (nWMV), CSF (nCSFV) volumes, and SIENA (PBVC) expressed as quartiles. C. Kaplan-Meyer curve of high risk (red) and low risk (blue) groups of MS conversion as predicted by the expression of RNA gene products hybridizing to 28 probe sets set forth in Table 2. D. Hierarchical clustering of the mRNA gene products hybridizing to 108 probe sets set forth in Table 1A that characterize group #1 patients.

[0011] FIG. 3. TOB1 abrogates T cell quiescence. A. Relative expression (fold change compared to controls) of TOB1 in CIS patients from group #1 and CIS patients from other groups assessed by RT-PCR. B. Relative expression of TOB1 (yellow bars), Interleukin-2 (green bars) and Interferon-gamma (red bars) assessed by RT-PCR in CD4+ T cells cultured for 6 or 24 hours in plates coated with 1 mg/ml anti-CD3 and 1 mg/ml anti-CD28 antibodies (n=3). C. Immunostaining for TOB1 and CD4 in lymph nodes of mice injected with MOG₃₅₋₅₅, CFA alone, or vehicle. D. Microarray-based TOB1 expression in lymph nodes and spinal cords from mice immunized with MOG₃₅₋₅₅+ adjuvant (EAE) or adjuvant only (CFA). E. Relative expression (fold change compared to controls) of CD44 in CIS patients from group #1 and CIS patients from other groups assessed by RT-PCR. F. Plasma OPN concentration in group #1 patients, other CIS and controls measured by ELISA. G. Genomic map of TOB1 showing the relative position of the 5 SNP used for association analysis. H. Schematic representation of gene expression signature in T cells from group #1 patients.

[0012] FIG. 4. Gene expression still differentiates group #1 from other CIS patients a year later. A. Hierarchical clustering of the expression of the same 1,718 genes as in FIG. 1 but obtained at 12 months. B. Number of genes differentially expressed in CIS compared to controls at baseline (orange circle), at 12 months (blue circle) or on both sets (intersection). C. A SVM predictive model was built using the expression of mRNA gene products hybridizing to 108 probe sets set forth in Table 1A that distinguished group #1 from other CIS patients.

### DETAILED DESCRIPTION OF THE INVENTION

### I. Definitions

[0013] Unless defined otherwise, all technical and scientific terms used herein have the same meaning as commonly understood by one of ordinary skill in the art to which this invention belongs. Generally, the nomenclature used herein and the laboratory procedures in cell culture, molecular genetics, and nucleic acid chemistry and hybridization described below are those well known and commonly employed in the art.

[0014] As used herein, “nucleic acid” means either DNA, RNA, single-stranded, double-stranded, or more highly aggregated hybridization motifs, and any chemical modifications thereof. Modifications include, but are not limited to, those which provide other chemical groups that incorporate additional charge, polarizability, hydrogen bonding, electrostatic interaction, and functionality to the nucleic acid ligand bases or to the nucleic acid ligand as a whole. Such modifications include, but are not limited to, peptide nucleic acids, phosphodiester group modifications (e.g., phosphorothioates, methylphosphonates), 2′-position sugar modifications, 5-position pyrimidine modifications, 8-position purine modifications, modifications at exocyclic amines, substitution of 4-thiouridine, substitution of 5-bromo or 5-iodo-uracil; backbone modifications, methylations, unusual base-pairing combinations such as the isobases isocytidine and isoguanidine and the like. Modifications can also include 3′ and 5′ modifications such as capping.

[0015] The term “nucleic acid” or “polynucleotide” refers to deoxyribonucleotides or ribonucleotides and polymers thereof in either single- or double-stranded form. Unless specifically limited, the term encompasses nucleic acids containing known analogues of natural nucleotides that have similar binding properties as the reference nucleic acid and are metabolized in a manner similar to naturally occurring nucleotides. Unless otherwise indicated, a particular nucleic acid sequence also implicitly encompasses conservatively modified variants thereof (e.g., degenerate codon substitutions), alleles, orthologs, SNPs (haplotypes), and complementary sequences as well as the sequence explicitly indicated. Specifically, degenerate codon substitutions may be achieved by generating sequences in which the third position of one or more selected (or all) codons is substituted with mixed-base and/or deoxyinosine residues (Batzer et al., Nucleic Acid Res. 19:5081 (1991); Ohtsuka et al., J. Biol. Chem. 260:2605-2608 (1985); and Cassol et al. (1992); Rossolini et al., Mol. Cell. Probes 8:91-98 (1994)). The term nucleic acid is used interchangeably with gene, cDNA, and mRNA encoded by a gene.

[0016] The phrase “selectively (or specifically) hybridizes to” refers to the detectable binding, duplexing, or hybridizing of a molecule only to a particular nucleotide sequence under stringent hybridization conditions when that sequence is present in a complex mixture (e.g., total cellular or library DNA or RNA).

[0017] The terms “identical” or percent “identity,” in the context of two or more nucleic acids, refer to two or more sequences or subsequences that are the same or have a specified percentage of nucleotides that are the same (i.e., about 60% identity, preferably 65%, 70%, 75%, 80%, 85%, 90%, 91%, 92%, 93%, 94%, 95%, 96%, 97%, 98%, 99%, or higher) identity over a specified region, when compared and aligned for maximum correspondence over a comparison window or designated region) as measured using a BLAST or BLAST 2.0 sequence comparison algorithms with default parameters described below, or by manual alignment and visual inspection (see, e.g., the NCBI web site or the like). Such sequences are then said to be “substantially identical.” This definition also refers to, or may be applied to, the compliment of a test sequence. The definition also includes sequences that have deletions and/or additions, as well as those that have substitutions. As described below, the preferred algorithms can account for gaps and the like. Preferably, identity exists over a region that is at least about 10, 11, 12, 13, 14, 15, 20, 25 amino acids or nucleotides in length, or over a region in the range 10-20, 10-25, 10-30, 10-40, 10-50, 10-60, 10-70, 10-80, 10-90, or even 10-100. In certain preferred embodiments, identity exists over a region that is 10-100 amino acids or nucleotides in length.

[0018] The phrase “stringent hybridization conditions” refers to conditions under which a first nucleic acid will hybridize to its target subsequence, typically in a complex mixture of nucleic acid, but not detectably to other sequences. Stringent conditions are sequence-dependent and will be different in different circumstances. Longer sequences hybridize specifically at higher temperatures. An extensive guide to the hybridization of nucleic acids is found in Tijssen, Techniques in Biochemistry and Molecular Biology—Hybridization with Nucleic Probes, “Overview of principles of hybridization and the strategy of nucleic acid assays” (1993). Generally, stringent conditions are selected to be about 5-10° C. lower than the thermal melting point (Tₘ) for the specific sequence at a defined ionic strength pH. The Tₘ is the temperature (under defined ionic strength, pH, and nucleic concentration) at which 50% of the probes complementary to the target hybridize to the target sequence at equilibrium (as the target sequences are present in excess, at Tₘ, 50% of the probes are occupied at equilibrium). Stringent conditions will be those in which the salt concentration is less than about 1.0 M sodium ion, typically about 0.01 to 1.0 M sodium ion concentration (or other salts) at pH 7.0 to 8.3 and the temperature is at least about 30° C. for short probes (e.g., 10 to 50 nucleotides) and at least about 60° C. for long probes (e.g., greater than 50 nucleotides). Stringent conditions may also be achieved with the addition of destabilizing agents such as formamide. For selective or specific hybridization, a positive signal is at least two times background, optionally 10 times background hybridization. Exemplary stringent hybridization conditions can be as following: 50% formamide, 5×SSC, and 1% SDS, incubating at 42° C., or 5×SSC, 1% SDS, incubating at 65° C., with wash in 0.2×SSC, and 0.1% SDS at 65° C. Such washes can be performed for 5, 15, 30, 60, 120, or more minutes.

[0019] Exemplary “moderately stringent hybridization conditions” include a hybridization in a buffer of 40% formamide, 1 M NaCl, 1% SDS at 37° C., and a wash in 1×SSC at 45° C. Such washes can be performed for 5, 15, 30, 60, 120, or more minutes. A positive hybridization is at least twice background. Those of ordinary skill will readily recognize that alternative hybridization and wash conditions can be utilized to provide conditions of similar stringency.

[0020] The terms “differential expression” or “differentially expressed” used in reference to the expression of a marker gene means an elevated level of expression of the marker gene or a lowered level of expression of the marker gene relative to a standard control that is indicative of a high risk CIS patient, as set forth in the methods and results disclosed herein (e.g. Tables 1, 2, 10A-12C, and 15A-17C). As is customary in the art, marker genes described herein each have an associated name (e.g., C17orf65, C4orf10, FAM98A, and the like). Accordingly, reference to a marker gene name in turn refers to the marker gene itself. “Target sequence” refers to a region within a target gene (e.g., marker gene) which a probe will identify, as known in the art. The term “probe set identifier” refers to set of nucleic acid probes capable of identifying a particular marker gene (e.g. target sequence). Probe set identifiers may be provided by Affymetrix (Santa Clara, Calif.), for example, as known in the art and disclosed herein. It is understood that one of skill in the art can, with only routine experimentation, design and use probes to identify specific marker genes as described herein. It is further understood that more than one probe, and more than one probe set identifier may be designed to identify a specific gene, for example a marker gene described herein.

### II. Methods and Kits

[0021] Provided herein are methods of determining whether a patient with clinically isolated syndrome (CIS) is at high risk of developing multiple sclerosis (MS). CIS patients at high risk of developing MS are typically those patients that develop MS within two years of being initially diagnosed with CIS or within two years of the onset of CIS. In some embodiments, high risk CIS patients are those that develop CIS within 18 months, 12 months, or 9 months of being initially diagnosed with CIS or the onset of CIS. Thus, the methods provided herein are useful in identifying CIS patients that are likely to develop MS quickly relative to the average CIS patient.

[0022] It has been discovered that certain genes are markers of rapid development of MS in CIS patients. These marker genes were identified as genes that are differentially expressed relative to healthy individuals and/or CIS patients that do not develop MS quickly (i.e. those that are at low risk of rapid onset of MS). Thus, by detecting the level of expression of a marker gene within a CIS patient and comparing the level of expression of the maker gene to a standard control, high risk CIS patients may be identified. In some embodiments, the level of a plurality (e.g. a panel) of marker genes are detected and compared to the level of expression of the maker gene to a standard control to identify high risk CIS patients. Specific panels or groups of maker genes are discussed below. In some embodiments, the standard control may be approximately the average amount of expression of the marker gene(s) in humans, humans without CIS, or humans with CIS that are not at high risk of developing MS. In other embodiments, the standard control is a detected level of expression of a standard control gene in the CIS patient.

[0023] In some embodiments, the marker gene is a gene set forth in Table 18, Table 19, Table 1A, Table 2, Table 4, Table 8 and/or Table 13. In some embodiments, the marker gene is any one of the genes set forth in Table 18, Table 19, Table 1A, Table 2, Table 4, Table 8 and/or Table 13. In some embodiments, a plurality (e.g. a panel or group) of marker genes are detected. Thus, in some embodiments all the marker genes set forth in one of the following tables is selected: Table 18, Table 19, Table 1A, Table 2, Table 4, Table 8 or Table 13. In another embodiment, at least 2-9, 10, 20, 30, 40, 50, 60, 70, 80, 90, 100, 150, 200, 250, 300, 400, 500, 600, 700, or 800 of the marker genes set forth in one of the following tables is selected, as appropriate according to the number of genes set forth within the following tables: Table 18, Table 19, Table 1A, Table 2, Table 4, Table 8 or Table 13. Where a plurality (e.g. panel or group) of genes are detected, any combination of the marker genes disclosed in relevant table(s) may be detected. By measuring the expression levels of these one or more of these marker genes in a patient with CIS and comparing those levels with healthy individuals and/or CIS patients that do not develop MS quickly, the risk of the patient developing MS may be assessed. In some related embodiments, the marker gene is ZNF12, C17orf65, BAT1, ARHGDIA, NAPA, ATP5G2, DDX52, NDFIP1, SDAD1, USP7, MEF2A, AGER, RAB1B, GDI1 and/or BANF1. In other related embodiments, the marker gene is ZNF12, C17orf65, BAT1, ARHGDIA, NAPA, ATP5G2, DDX52, NDFIP1 and/or SDAD1. In still other related embodiments, the marker gene is USP7, MEF2A, AGER, RAB1B, GDI1 and/or BANF1. In other embodiments, the marker gene is TOB1. In other embodiments, the marker gene is not TOB1. In some embodiments, the marker gene is C17orf65, C4orf10, FAM98A, TLE1, INHBC, NAPA, TKT, TPT1, FLJ20054, KIAA0794, LOC 134492, and/or MGC34648. In some embodiments, the marker gene is any one of C17orf65, C4orf10, FAM98A, TLE1, INHBC, NAPA, TKT, TPT1, FLJ20054, KIAA0794, LOC134492 or MGC34648. In some embodiments, the marker gene is included within a plurality of genes selected from C17orf65, C4orf10, FAM98A, TLE1, INHBC, NAPA, TKT, TPT1, FLJ20054, KIAA0794, LOC134492 and MGC34648. In some embodiments, the marker gene is CD1D, CD44, CDC34, CDKN1C, CD47, GZMM, and/or PPIA. In some embodiments, the marker gene is any one of CD1D, CD44, CDC34, CDKN1C, CD47, GZMM, or PPIA. In some embodiments, the marker gene included within a plurality of genes selected from CD1D, CD44, CDC34, CDKN1C, CD47, GZMM, or PPIA.

[0024] In certain embodiments, the method described herein for detecting the level of expression of a marker gene is an in vitro method. In some embodiments, the marker gene is a gene set forth in Table 18, Table 19, Table 1A, Table 2, Table 4, Table 8 and/or Table 13, and detection is conducted in vitro (e.g. on a biological sample derived from a CIS patient).

[0025] The expression levels of the marker genes may be measured using any appropriate method. In some embodiments, the amount of RNA expressed by the marker gene is measured. The amount of RNA expressed may be assessed, for example, using nucleic acid probes with marker gene coding sequences or using quantitative PCR techniques. For example, a nucleic acid array forming a probe set may be used to detect RNA expressed by the marker gene. The RNA expressed by the marker gene may be transcribed to cDNA (and in some cases to cRNA) and then queried with a gene chip array using methods known in the art. Thus, in some embodiments the marker gene may also be a gene including a nucleic acid sequence having at least 90%, 91%, 92%, 93%, 94%, 95%, 96%, 97%, 98%, 99%, or 100% identity over at least a 10 or 20 nucleotide continuous region (i.e. sequence) within a marker gene identified in Table 18, Table 19, Table 1A, Table 2, Table 4, Table 8, and/or Table 13, or with a target sequence to which the probe set identified in Table 18, Table 19, Table 1A, Table 2, Table 4, Table 8 and/or Table 13 is designed to interrogate. For example, the continuous region may be 10, 11, 12, 13, 14, 15, 16, 17, 18, 19 or 20 nucleotides in length. In related embodiments, the marker gene includes a nucleic acid sequence having at least 90%, 91%, 92%, 93%, 94%, 95%, 96%, 97%, 98%, 99%, or 100% identity with the entire length of one or more nucleic acids within a marker gene identified in Table 18, Table 19, Table 1A, Table 2, Table 4, Table 8, and/or Table 13, or with a target sequence to which the probe set identified in Table 18, Table 19, Table 1A, Table 2, Table 4, Table 8 and/or Table 13 is designed to interrogate. In other related embodiments, the marker gene includes a nucleic acid sequence having 100% identity with the entire length of one or more nucleic acids within a marker gene identified in Table 18, Table 19, Table 1A, Table 2, Table 4, Table 8, and/or Table 13, or with a target sequence to which the probe set identified in Table 18, Table 19, Table 1A, Table 2, Table 4, Table 8 and/or Table 13 is designed to interrogate. In other related embodiments, “one or more” nucleic acids within a probe set identified in Table 18, Table 19, Table 1A, Table 2, Table 4, Table 8, and/or Table 13 referred to above is the majority or all of the nucleic acids within the probe set.

[0026] Tables 1A, 2, 4, 8, 13, 18 and 19 provide probe set identifiers using Affymetrix probe set identifier numbers, as known in the art. The nucleic acid sequences contained within each probe set identifier number and the target sequence to which the probe set is designed to interrogate are publicly available in a variety of sources, including the Affymetrix website and the National Cancer Institute website. The term “designed to interrogate” in the context of target genes, marker genes and probes refers to a probe having sufficient primary sequence complementarity to a target to detectably bind the target, as well known in the art.

[0027] In some embodiments, the marker gene includes a nucleic acid sequence within a marker gene identified in Table 1A. In other embodiments, the marker gene includes a nucleic acid sequence within a marker gene identified in Table 2. In other embodiments, the marker gene includes a nucleic acid sequence within a p marker gene identified in Table 4. In other embodiments, the marker gene includes a nucleic acid sequence within a marker gene identified in Table 8. In other embodiments, the marker gene includes a nucleic acid sequence within a marker gene identified in Table 13. In some embodiments, the marker gene is a gene set forth in Table 18. In some embodiments, the marker gene is C17orf65 (SEQ ID NO:977), C4orf10 (SEQ ID NO:1005), FAM98A (SEQ ID NO:1020), TLE1 (SEQ ID NO:844), INHBC (SEQ ID NO:993), NAPA (SEQ ID NO:995), TKT (SEQ ID NO:994), TPT1 (SEQ ID NO:138), F1120054 (SEQ ID NO:11), KIAA0794 (SEQ ID NO:104), LOC134492 (SEQ ID NO:184), and/or MGC34648 (SEQ ID NO:348). In some embodiments, the expression levels of a plurality (e.g., 2, 3, 4, 5, 6, 7, 8, 9, 10, 11, 12 and/or 13) of marker genes as disclosed in Table 18 are detected. In some embodiments, the marker gene is a gene set forth in Table 19. In some embodiments, the marker gene is CD1D (SEQ ID NO:376), CD44 (SEQ ID NO:275), CDC34 (SEQ ID NO:553), CDKN1C (SEQ ID NO:320), CD47 (SEQ ID NO:1015), GZMM (SEQ ID NO:617), and/or PPIA (SEQ ID NO:1010). In some embodiments, the expression levels of a plurality (e.g., 2, 3, 4, 5, 6 or 7) of marker genes as disclosed in Table 19 are detected.

[0028] The comparison of the marker gene expression levels with a standard control may be accomplished by determining whether the marker gene is expressed in the CIS patient at an elevated level or a lowered level (i.e. detecting differential expression). The elevated or lowered levels are indicative of rapid development of multiple sclerosis (MS) (e.g. within two years of being initially diagnosed with CIS). Whether elevation or lowering of expression of a particular marker gene expression is indicative of rapid onset of MS in a CIS patient is clearly set forth in Tables 1A, 2, 10A-12C, and 15A-17C. For example, where the marker gene is TOB1, Table 1A clearly shows that lowered expression of TOB1 is indicative of rapid onset of MS in a CIS patient.

[0029] The standard control may be any appropriate standard known in the art. In some embodiments, the standard control is approximately the average amount of expression of the marker gene in humans, humans without CIS, or humans with CIS that are not at high risk of developing MS. Approximate average relative amounts of expression of marker genes are set forth in Tables 1A and 2 in a sample of humans without CIS, humans with CIS that are not at high risk of developing MS, and humans with CIS at high risk of developing MS. In addition, Table 4 provides approximate average amounts of expression of genes for humans with CIS and humans without CIS.

[0030] In other embodiments, the standard control is a detected level of expression of a standard control gene in the CIS patient. As used herein, a standard control gene is a human gene that is expressed at approximately constant levels thereby providing a baseline reading of gene expression for an individual. The standard control gene may also be referred to herein and in the art as a housekeeping gene. In some embodiments, the standard control gene is GAPDH, 18s ribosomal subunit, beta actin (ACTB), PPP1CA, beta 2 microglobulin (B2M), HPRT1, RPS13, RPL27, RPS20 or OAZ1.

[0031] The elevated level of expression of the marker gene or the lowered level of expression of the marker gene may be determined by calculating the ratio of the level of expression of the marker gene to the level of expression of a standard control gene. For example, Table 1B lists an average amount of GAPDH in the subjects studied according to the examples set forth below. The corresponding ratios of marker genes to GAPDH are set forth in Tables 1A and 2. By using the calculated ratios provided in Tables 1A and 2, the ratio of expression of a corresponding marker gene to GAPDH in a CIS patient may be calculated. Where the calculated marker to GAPDH ratio in the patient is approximately equal to the corresponding ratio provided in Table 1A and 2, the CIS patient is at high risk of rapidly developing MS.

[0032] In some embodiments, statistical models are established for determining whether expression of a marker gene is indicative of a CIS patient that is highly likely to develop MS, for example within 9 months of being initially diagnosed with CIS. Thus, in some related embodiments, the standard control is a threshold expression value obtained from a statistical model. Threshold expression values may be obtained optionally using a standard gene (e.g. GADPH or ACTB) and a classifier algorithm (e.g. compound covariate predictor (CCP), diagonal linear discriminant analysis (DLDA), and/or support vector machines (SVM) classifiers) (see Example 9 and Tables 8 to 17C). In some embodiments, a composite predictor is used to establish a statistical model or threshold vale wherein the composite predictor employs a CCP, DLDA and SVM. Where the expression of a marker gene in a CIS subject is above the calculated threshold expression value, a patient with CIS is at high risk for developing MS.

[0033] Using the teachings provided herein, one skilled in the art is enabled to use any known housekeeping gene to establish similar ratios and statistical models to identify CIS patients at high risk of rapidly developing MS using the disclosed methods.

[0034] In another aspect, there is provided an in vitro method for determining whether a patient with clinically isolated syndrome (CIS) is at high risk of developing multiple sclerosis (MS). The method includes isolating mRNA from the patient, thereby providing an in vitro nucleic acid sample. Optionally, the method further includes subjecting the in vitro nucleic acid sample to polymerase chain reaction under conditions suitable to amplify nucleic acid within the in vitro nucleic acid sample. The in vitro nucleic acid sample is contacted with a microarray, the microarray having a plurality of probes designed to interrogate specific marker genes. The level of nucleic acid duplex formation is determined between the in in vitro nucleic acid sample and the microarray, thereby providing the expression level of nucleic acid present in the in vitro nucleic acid sample. The expression level of nucleic acid is then compared to the expression level of a standard control. A differential expression of the marker gene relative to said standard control indicates that the patient is at high risk of developing multiple sclerosis. In some embodiments, the standard control may be approximately the average amount of expression of the marker gene in humans, humans without CIS, or humans with CIS that are not at high risk of developing MS. In other embodiments, the standard control is a detected level of expression of a standard control gene in the CIS patient. In some embodiments, the marker gene is a gene set forth in Table 18, Table 19, Table 1A, Table 2, Table 4, Table 8 and/or Table 13. In some embodiments, the marker gene is any one of the marker genes set forth in Table 18, Table 19, Table 1A, Table 2, Table 4, Table 8 and/or Table 13. In some embodiments, the expression level of a plurality (e.g., 2, 3, 4, 5, 6, 7, 8, 9, 10, 15, 20, 30, 40, 50, 60, 70, 80, 90 or 100) of marker genes as set forth in Table 18, Table 19, Table 1A, Table 2, Table 4, Table 8 and/or Table 13, are determined. In some embodiments, the marker gene is ZNF12, C17orf65, BATT, ARHGDIA, NAPA, ATP5G2, DDX52, NDFIP1, SDAD1, USP7, MEF2A, AGER, RAB1 B, GDI1 and/or BANF1. In other related embodiments, the marker gene is ZNF12, C17orf65, BAT1, ARHGDIA, NAPA, ATP5G2, DDX52, NDFIP1 and/or SDAD1. In still other related embodiments, the marker gene is USP7, MEF2A, AGER, RAB1 B, GDI1 and/or BANF1. In some embodiments, the expression levels of a plurality (e.g., 2, 3, 4, 5, 6, 7, 8, 9, 10, 11, 12, 13, 14 or 15) of marker genes selected from ZNF12, C17orf65, BAT1, ARHGDIA, NAPA, ATP5G2, DDX52, NDFIP1, SDAD1, USP7, MEF2A, AGER, RAB1 B, GDI1 and BANF1. In some embodiments, the marker gene is a gene set forth in Table 18. In some embodiments, the marker gene is C17orf65 (SEQ ID NO:977), C4orf10 (SEQ ID NO:1005), FAM98A (SEQ ID NO:1020), TLE1 (SEQ ID NO:844), INHBC (SEQ ID NO:993), NAPA (SEQ ID NO:995), TKT (SEQ ID NO:994), TPT1 (SEQ ID NO:138), F1120054 (SEQ ID NO:11), KIAA0794 (SEQ ID NO:104), LOC134492 (SEQ ID NO:184), or MGC34648 (SEQ ID NO:348). In some embodiments, the expression levels of a plurality (e.g., 2, 3, 4, 5, 6, 7, 8, 9, 10, 11, 12 or 13) of marker genes as disclosed in Table 18 are detected. In some embodiments, the marker gene is a gene set forth in Table 19. In some embodiments, the marker gene is CD1D (SEQ ID NO:376), CD44 (SEQ ID NO:275), CDC34 (SEQ ID NO:553), CDKN1C (SEQ ID NO:320), CD47 (SEQ ID NO:1015), GZMM (SEQ ID NO:617), or PPIA (SEQ ID NO:1010). In some embodiments, the expression levels of a plurality (e.g., 2, 3, 4, 5, 6 or 7) of marker genes as disclosed in Table 19 are detected.

[0035] In another aspect, a kit is provided for use in identifying a patient with clinically isolated syndrome (CIS) at high risk of developing multiple sclerosis (MS). The kit includes (i) a nucleic acid sequence having at least 90%, 91%, 92%, 93%, 94%, 95%, 96%, 97%, 98%, 99%, or 100% identity over at least a 10 nucleotide continuous region (e.g., 10, 11, 12, 13, 14, 15, 16, 17, 18, 19 or 20, or within the range 10-50, 10-40, 10-30, or 10-20) with one or more nucleic acids within a marker gene identified in Table 18, Table 19, Table 1A, Table 2, Table 4, Table 8, and/or Table 13, (ii) a nucleic acid sequence having at least 90%, 91%, 92%, 93%, 94%, 95%, 96%, 97%, 98%, 99%, or 100% identity over at least a 10 (e.g., 10, 11, 12, 13, 14, 15, 16, 17, 18, 19 or 20) nucleotide continuous region with a target sequence to which the probe set identified in Table 18, Table 19, Table 1A, Table 2, Table 4, Table 8 and/or Table 13 is designed to interrogate, or (iii) a nucleic acid complimentary to the nucleic acids set forth in (i) or (ii) above. In some embodiments, the kit also includes an electronic device or computer software capable of comparing a marker gene expression level from the patient to a standard control thereby indicating whether the patient is at high risk of developing multiple sclerosis. In some embodiments, the kit contains a plurality (e.g., 2, 3, 4, 5, 6, 7, 8, 9, 10, 11, 12, 13, 14, 15, 16, 17, 18, 19 or 20) of nucleic acid sequences having at least 90%, 91%, 92%, 93%, 94%, 95%, 96%, 97%, 98%, 99%, or 100% identity over at least a 10 nucleotide continuous region (e.g., 10, 11, 12, 13, 14, 15, 16, 17, 18, 19 or 20, or within the range 10-50, 10-40, 10-30, or 10-20) with a marker gene identified in Table 18, Table 19, Table 1A, Table 2, Table 4, Table 8, and/or Table 13, or complement thereof. In some embodiments, the kit contains a plurality (e.g., 2, 3, 4, 5, 6, 7, 8, 9, 10, 11, 12, 13, 14, 15, 16, 17, 18, 19 or 20) of nucleic acid sequences having at least 90%, 91%, 92%, 93%, 94%, 95%, 96%, 97%, 98%, 99%, or 100% identity over at least a 10 nucleotide continuous region (e.g., 10, 11, 12, 13, 14, 15, 16, 17, 18, 19 or 20, or within the range 10-50, 10-40, 10-30, or 10-20) with a marker gene identified in Table 18, Table 19, Table 1A, Table 2, Table 4, Table 8, and/or Table 13, or complement thereof. In some embodiments, the plurality of marker genes are all or a portion of marker genes listed in Table 18, Table 19, Table 1A, Table 2, Table 4, Table 8, or Table 13, or the plurality of marker genes comprise a nucleic acid of at least 10 nucleotides in length and at least 90% identity with a contiguous region of all or a portion of marker gene sequences listed in Table 18, Table 19, Table 1A, Table 2, Table 4, Table 8, or Table 13. In some embodiments, the plurality of marker genes are all or a portion of marker genes listed in one of Table 18, Table 19, Table 1A, Table 2, Table 4, Table 8, or Table 13, or the plurality of marker genes comprise a nucleic acid of at least 10 nucleotides in length and at least 90% identity with a contiguous region of all or a portion of marker gene sequences listed in one of Table 18, Table 19, Table 1A, Table 2, Table 4, Table 8, or Table 13. In other embodiments, the plurality of marker genes are all marker genes listed in one of Table 18, Table 19, Table 1A, Table 2, Table 4, Table 8, or Table 13, or the plurality of marker genes comprise a nucleic acid of at least 10 nucleotides in length and at least 90% identity with a contiguous region of all marker gene sequences listed in one of Table 18, Table 19, Table 1A, Table 2, Table 4, Table 8, or Table 13.

[0036] In some embodiments, the electronic device or computer software employs the use of a statistical model. The electronic device or computer software may also utilize a threshold expression values obtained optionally using a standard gene (e.g. GADPH or ACTB) and a classifier algorithm (e.g. compound covariate predictor (CCP), diagonal linear discriminant analysis (DLDA), and/or support vector machines (SVM) classifiers) such as those set forth in Example 9 and Tables 8 to 17. One skilled in the art will immediately recognize that the electronic device or computer software may be used in the methods disclosed herein.

[0037] In some embodiments, the nucleic acid provided in the kit above may be a probe nucleic acid for use in a PCR technique, such as quantitative PCR, to assess the expression of a given marker gene. In some embodiments, the nucleic acid sequence has 100% identity with a continuous nucleic acid region (i.e. sequence) within a marker gene identified in Table 18, Table 19, Table 1A, Table 2, Table 4, Table 8, and/or Table 13, or with a target sequence to which the probe set identified in Table 18, Table 19, Table 1A, Table 2, Table 4, Table 8 and/or Table 13 is designed to interrogate, or is complimentary thereto. In other embodiments, the nucleic acid has the same sequence as a nucleic acid contained within a marker gene identified in Table 18, Table 19, Table 1A, Table 2, Table 4, Table 8, and/or Table 13 or the target sequence to which the probe set identified in Table 18, Table 19, Table 1A, Table 2, Table 4, Table 8 and/or Table 13 is designed to interrogate, or is complimentary thereto.

[0038] The nucleic acid provided in the kit may also hybridize under stringent conditions (or moderately stringent conditions) to a nucleic acid sequence within a marker gene identified in Table 18, Table 19, Table 1A, Table 2, Table 4, Table 8 and/or Table 13 or a target sequence to which the probe set identified in Table 18, Table 19, Table 1A, Table 2, Table 4, Table 8 and/or Table 13 is designed to interrogate. The nucleic acid provided in the kit may also be perfectly complimentary to a nucleic acid sequence within a marker gene identified in Table 18, Table 19, Table 1A, Table 2, Table 4, Table 8 and/or Table 13 or a target sequence to which the probe set identified in Table 18, Table 19, Table 1A, Table 2, Table 4, Table 8 and/or Table 13 is designed to interrogate.

[0039] The present invention also contains the subject matter of the following numbered embodiments:

### Embodiment 1

[0040] A method of identifying a patient with clinically isolated syndrome (CIS) at high risk of developing multiple sclerosis (MS), said method comprising:
[0041] detecting the level of expression of a marker gene within said patient, wherein said marker gene is a marker gene set forth in Table 18, Table 19, Table 1A, Table 2, Table 4, Table 8, or Table 13, or said marker gene comprises a nucleic acid of at least 10 nucleotides in length and at least 90% identity with a contiguous portion of one of SEQ ID NO:1 to SEQ ID NO:1021; and comparing the level of expression of said marker gene to a standard control whereby a differential expression of said marker gene relative to said standard control indicates that said patient is at high risk of developing multiple sclerosis.

### Embodiment 1A

[0042] A method of identifying a patient with clinically isolated syndrome (CIS) at high risk of developing multiple sclerosis (MS), said method comprising:
[0043] detecting the level of expression of a plurality of marker genes within said patient, wherein said plurality of marker genes are all or a portion of marker genes listed in one of Table 18, Table 19, Table 1A, Table 2, Table 4, Table 8, or Table 13, or said plurality of marker genes comprises a nucleic acid of at least 10 nucleotides in length and at least 90% identity with a contiguous region of all or a portion of marker gene sequences listed in one of Table 18, Table 19, Table 1A, Table 2, Table 4, Table 8, or Table 13; and
   comparing the level of expression of said plurality of marker genes to a standard control whereby a differential expression of said plurality of marker genes relative to said standard control indicates that said patient is at high risk of developing multiple sclerosis.

### Embodiment 2

[0044] The method of Embodiment 1, wherein said marker gene comprises a nucleic acid sequence at least 10 nucleotides in length having at least 90% identity with a contiguous portion of a nucleic acid having the sequence of one of SEQ ID NO:1 to SEQ ID NO:1021.

### Embodiment 3

[0045] The method of Embodiment 1 or Embodiment 2, wherein the said marker gene comprises a nucleic acid sequence at least 10 nucleotides in length having at least 95% identity with a contiguous portion of a nucleic acid having the sequence of one of SEQ ID NO:1 to SEQ ID NO:1021.

### Embodiment 4

[0046] The method of any preceding Embodiments, wherein the method is an in vitro method and comprises detecting the level of expression of a marker gene in a sample previously isolated from said patient.

### Embodiment 5

[0047] The method of Embodiment 4, which comprises contacting the sample with at least one_nucleic acid of at least 10 nucleotides in length and having at least 90% identity with a contiguous portion of one of SEQ ID NO:1 to SEQ ID NO:1021, and optionally comprises contacting the sample with 2, 3, 4, 5, 6, 7, 8, 9, 10 or more nucleic acids of at least 10 nucleotides in length and having at least 90% identity with a contiguous portion of one of SEQ ID NO:1 to SEQ ID NO:1021.

### Embodiment 6

[0048] The method of Embodiment 4, which comprises contacting the sample with at least one_nucleic acid of at least 10 nucleotides in length and at least 95% identity with a contiguous portion of one of SEQ ID NO:1 to SEQ ID NO:1021, and optionally comprises contacting the sample with 2, 3, 4, 5, 6, 7, 8, 9, 10 or more nucleic acids of at least 10 nucleotides in length and having at least 95% identity with a contiguous portion of one of SEQ ID NO:1 to SEQ ID NO:1021,

### Embodiment 7

[0049] The method of Embodiment 4, which comprises contacting the sample with at least one_nucleic acid of at least 10 nucleotides in length and at least 99% identity with a contiguous portion of one of SEQ ID NO:1 to SEQ ID NO:1021, and optionally comprises contacting the sample with 2, 3, 4, 5, 6, 7, 8, 9, 10 or more nucleic acids of at least 10 nucleotides in length and having at least 99% identity with a contiguous portion of one of SEQ ID NO:1 to SEQ ID NO:1021,

### Embodiment 8

[0050] The method of any preceding Embodiment, wherein said marker gene is a marker gene set forth in Table 18.

### Embodiment 9

[0051] The method of any of Embodiments 1 to 7, wherein said marker gene is a marker gene set forth in Table 19.

### Embodiment 10

[0052] The method of any of Embodiments 1 to 7, wherein said marker gene is ZNF12 (SEQ ID NO:83), C17orf65 (SEQ ID NO:977), BAT1 (SEQ ID NO:981), ARHGDIA (SEQ ID NO:1000), NAPA (SEQ ID NO:995), ATP5G2 (SEQ ID NO:996), DDX52 (SEQ ID NO:292), NDFIP1 (SEQ ID NO:2), SDAD1 (SEQ ID NO:116), USP7 (SEQ ID NO:1014), MEF2A (SEQ ID NO:1007), AGER (SEQ ID NO:998), RAB1B (SEQ ID NO:1011), GDI1 (SEQ ID NO:986) or BANF1(SEQ ID NO:999).

### Embodiment 11

[0053] The method of any of Embodiments 1 to 7, wherein said marker gene is ZNF12 (SEQ ID NO:83), C17orf65 (SEQ ID NO:977), BAT1 (SEQ ID NO:981), ARHGDIA (SEQ ID NO:1000), NAPA (SEQ ID NO:995), ATP5G2 (SEQ ID NO:996), DDX52 (SEQ ID NO:292), NDFIP1 (SEQ ID NO:2) or SDAD1 (SEQ ID NO:116).

### Embodiment 12

[0054] The method of any of Embodiments 1 to 7, wherein said marker gene is USP7 (SEQ ID NO:1014), MEF2A (SEQ ID NO:1007), AGER (SEQ ID NO:998), RAB1B (SEQ ID NO:1011), GDI1 (SEQ ID NO:986) or BANF1 (SEQ ID NO:999).

### Embodiment 13

[0055] The method of any of Embodiments 1 to 7, wherein said marker gene is C17orf65 (SEQ ID NO:977), C4orf10 (SEQ ID NO:1005), FAM98A (SEQ ID NO:1020), TLE1 (SEQ ID NO:844), INHBC (SEQ ID NO:993), NAPA (SEQ ID NO:995), TKT (SEQ ID NO:994), TPT1 (SEQ ID NO:138), F1120054 (SEQ ID NO:11), KIAA0794 (SEQ ID NO:104), LOC134492 (SEQ ID NO:184), or MGC34648 (SEQ ID NO:348).

### Embodiment 14

[0056] The method of any of Embodiments 1 to 7, wherein said marker gene is CD1D (SEQ ID NO:376), CD44 (SEQ ID NO:275), CDC34 (SEQ ID NO:553), CDKN1C (SEQ ID NO:320), CD47 (SEQ ID NO:1015), GZMM (SEQ ID NO:617), or PPIA (SEQ ID NO:1010).

### Embodiment 15

[0057] The method of any preceding Embodiment, wherein said standard control is a detected level of expression of a standard control gene in said patient.

### Embodiment 16

[0058] The method of Embodiment 15, wherein said standard control gene is GAPDH, 18s ribosomal subunit, beta actin (ACTB), PPP1CA, beta 2 microglobulin (B2M), HPRT1, RPS13, RPL27, RPS20 or OAZ1.

### Embodiment 17

[0059] The method of Embodiment 16, wherein said standard control gene is GAPDH.

### Embodiment 18

[0060] The method of any preceding Embodiment, wherein the elevated level of expression of said marker gene or the lowered level of expression of said marker gene is determined by the ratio of the level of expression of said marker gene to the level of expression of said standard control gene, whereby said ratio being approximately equal to the corresponding ratio set forth in Table 1A or Table 2 predicts development of MS within two years of being initially diagnosed with CIS.

### Embodiment 19

[0061] The method of any preceding Embodiment, wherein the elevated level of expression of said marker gene or the lowered level of expression of said marker gene is determined by a threshold expression level resulting from a statistical model.

### Embodiment 20

[0062] The method of Embodiment 19, wherein said statistical model is obtained using a classifier algorithm selected from a compound covariate predictor, a diagonal linear discriminant analysis, and a support vector machine.

### Embodiment 21

[0063] The method of any preceding Embodiment, wherein said patient at high risk of developing MS is a patient with CIS that will develop MS within two years of being initially diagnosed with CIS.

### Embodiment 22

[0064] A kit for use in identifying a patient with clinically isolated syndrome (CIS) at high risk of developing multiple sclerosis (MS), said kit comprising;
[0065] (i) a nucleic acid comprising a sequence having at least 90%, 91%, 92%, 93%, 94%, 95%, 96%, 97%, 98%, 99%, or 100% identity over at least a 10 nucleotide continuous region with one or more nucleic acids having SEQ ID NO:1 to SEQ ID NO:1021, or a nucleic acid complimentary thereto; and
[0066] (ii) an electronic device or computer software capable of comparing a marker gene expression level from said patient to a standard control thereby indicating whether said patient is at high risk of developing MS.

### Embodiment 22A

[0067] A kit for use in identifying a patient with clinically isolated syndrome (CIS) at high risk of developing multiple sclerosis (MS), said kit comprising;
[0068] (i) a nucleic acid comprising a sequence having at least 90%, 91%, 92%, 93%, 94%, 95%, 96%, 97%, 98%, 99%, or 100% identity over at least a 10 nucleotide continuous region with one or more nucleic acids having SEQ ID NO:1 to SEQ ID NO:1021, or a nucleic acid complimentary thereto.

### Embodiment 23

[0069] The kit of Embodiment 22 or 22A, wherein the nucleic acid is at least 10 nucleotides in length.

### Embodiment 24

[0070] The kit of Embodiment 22, 22A or Embodiment 23, which comprises a nucleic acid comprising a sequence having at least 90%, 91%, 92%, 93%, 94%, 95%, 96%, 97%, 98%, 99%, or 100% identity over at least a 10 nucleotide continuous region with one or more marker genes wherein said marker gene is selected from ZNF12 (SEQ ID NO:83), C 17orf65 (SEQ ID NO:977), BAT1 (SEQ ID NO:981), ARHGDIA (SEQ ID NO:1000), NAPA (SEQ ID NO:995), ATP5G2 (SEQ ID NO:996), DDX52 (SEQ ID NO:292), NDFIP1 (SEQ ID NO:2), SDAD1 (SEQ ID NO:116), USP7 (SEQ ID NO:1014), MEF2A (SEQ ID NO:1007), AGER (SEQ ID NO:998), RAB1B (SEQ ID NO:1011), GDI1 (SEQ ID NO:986) and BANF1(SEQ ID NO:999).

### Embodiment 25

[0071] The kit of Embodiment 22, 22A or Embodiment 23, which comprises a nucleic acid comprising a sequence having at least 90%, 91%, 92%, 93%, 94%, 95%, 96%, 97%, 98%, 99%, or 100% identity over at least a 10 nucleotide continuous region with one or more marker genes wherein said marker gene is selected from ZNF12 (SEQ ID NO:83), C17orf65 (SEQ ID NO:977), BAT1 (SEQ ID NO:981), ARHGDIA (SEQ ID NO:1000), NAPA (SEQ ID NO:995), ATP5G2 (SEQ ID NO:996), DDX52 (SEQ ID NO:292), NDFIP1 (SEQ ID NO:2) and SDAD1 (SEQ ID NO:116).

### Embodiment 26

[0072] The kit of Embodiment 22, 22A or Embodiment 23, which comprises a nucleic acid comprising a sequence having at least 90%, 91%, 92%, 93%, 94%, 95%, 96%, 97%, 98%, 99%, or 100% identity over at least a 10 nucleotide continuous region with one or more marker genes wherein said marker gene is selected from USP7 (SEQ ID NO:1014), MEF2A (SEQ ID NO:1007), AGER (SEQ ID NO:998), RAB1B (SEQ ID NO:1011), GDI1 (SEQ ID NO:986) and BANF1 (SEQ ID NO:999).

### Embodiment 27

[0073] Use, in the identification of a patient with clinically isolated syndrome (CIS) at high risk of developing multiple sclerosis (MS), of a microarray comprising a nucleic acid immobilised on a solid substrate, said nucleic acid having a sequence having at least 90%, 91%, 92%, 93%, 94%, 95%, 96%, 97%, 98%, 99%, or 100% identity over at least a 10 nucleotide continuous region with one or more marker genes wherein said marker gene is selected from the group consisting of SEQ ID NO:1 to SEQ ID NO:1021.

### Embodiment 28

[0074] The use of Embodiment 27, wherein said nucleic acid comprises a sequence having at least 90%, 91%, 92%, 93%, 94%, 95%, 96%, 97%, 98%, 99%, or 100% identity over at least a 10 nucleotide continuous region with one or more marker genes wherein said marker gene is selected from ZNF12 (SEQ ID NO:83), C17orf65 (SEQ ID NO:977), BAT1 (SEQ ID NO:981), ARHGDIA (SEQ ID NO:1000), NAPA (SEQ ID NO:995), ATP5G2 (SEQ ID NO:996), DDX52 (SEQ ID NO:292), NDFIP1 (SEQ ID NO:2) or SDAD1 (SEQ ID NO:116), USP7 (SEQ ID NO:1014), MEF2A (SEQ ID NO:1007), AGER (SEQ ID NO:998), RAB1B (SEQ ID NO:1011), GDI1 (SEQ ID NO:986) and BANF1 (SEQ ID NO:999).

### Embodiment 29

[0075] The use of Embodiment 27, wherein said marker gene is ZNF12 (SEQ ID NO:83), C17orf65 (SEQ ID NO:977), BAT1 (SEQ ID NO:981), ARHGDIA (SEQ ID NO:1000), NAPA (SEQ ID NO:995), ATP5G2 (SEQ ID NO:996), DDX52 (SEQ ID NO:292), NDFIP1 (SEQ ID NO:2) or SDAD1 (SEQ ID NO:116).

### Embodiment 30

[0076] The use of Embodiment 27, wherein said marker gene is USP7 (SEQ ID NO:1014), MEF2A (SEQ ID NO:1007), AGER (SEQ ID NO:998), RAB1B (SEQ ID NO:1011), GDI1 (SEQ ID NO:986) or BANF1 (SEQ ID NO:999).

### Embodiment 31

[0077] The use of Embodiment 27, wherein a plurality of nucleic acids are immobilised on said solid substrate, said plurality of nucleic acids having a sequence having at least 90%, 91%, 92%, 93%, 94%, 95%, 96%, 97%, 98%, 99%, or 100% identity over at least a 10 nucleotide continuous region with all marker gene sequences listed in Table 18, Table 19, Table 1A, Table 2, Table 4, Table 8, or Table 13.

### III. Examples

### 1. Molecular Signature in CD4+ Cells Segregates Cis Patients from Controls

[0078] Gene expression microarray analysis was performed in negatively isolated naïve CD4+ T-cells obtained from 37 CIS patients after initial clinical presentation (mean 4.5+/−2.6 months) and from 29 controls matched for age and gender. Four arrays failed to pass our quality control protocol and were thus excluded from further analysis. Demographic characteristics of the remaining patients (n=34) and controls (n=28) were similar (Table 3). Analysis was focused on the 1,718 probe sets that showed at least a 2 fold-change from each gene's median value in more than 20% of the samples.

[0079] Principal component analysis (PCA) using expression values from these 1,718 probe sets showed a clear segregation between controls and CIS samples (FIG. 1a). Furthermore, a hierarchical clustering of all samples based on the expression of the same probe sets discriminated CIS from controls with high accuracy (only 3 samples were misclassified, 2 controls and 1 patient) (FIG. 1b). The robustness index for this classification was 99.8% (see material and methods). Noteworthy, PCA and hierarchical clustering were performed with the 1,718 probe sets with the highest variance across all samples, but without any prior statistical testing for differences between cases and controls.

[0080] When subjected to a T-test, 975 probe sets were found differentially expressed between CIS and controls after correction for multiple comparisons (FDR<0.1 (Table 4). Interestingly, most of the discriminating transcripts (70%) were under-expressed in CIS whereas the remaining 30% were over-expressed. This finding is in agreement with previous observations that downregulated genes greatly outnumber upregulated genes in T lymphocytes from MS patients when studied by gene expression microarrays (6, 7) or by FACS (8).

[0081] Gene ontology (GO) enrichment of these 975 differentially expressed genes revealed alteration of major molecular functions and biological processes (FIG. 1c). Unexpectedly for an autoimmune disease, most genes involved in inflammatory responses were downregulated in CIS individuals including pro-inflammatory cytokines, chemokines, integrins, and HLA class II molecules (Table 4). One possible explanation for overall reduced transcript abundance is cell death. However, there was no evidence found that this generalized downregulation was due to increased apoptosis. Quite the opposite, transcripts coding for the anti-apoptotic molecule BAX were increased by 2-fold whereas those coding for the pro-apoptotic molecules BCL-2 and cytochrome C (CYCS) were decreased by 2-fold. Over-expressed genes were mostly involved in protein metabolism (27% of over-expressed genes) and/or nucleotide binding (23% of over-expressed genes). Altogether, these results suggest a decreased inflammatory activity in CD4+ T cells from CIS patients.

[0082] On the basis of transcriptional activity, samples from CIS patients segregated into 4 groups (groups #1, 2, 3, 4) corresponding to the first 4 splits of the dendrogram (Robustness index 99.4%) (FIG. 1b). Furthermore, the likelihood that this segregation occurred by chance using IBIS, a supervised machine learning approach was investigated (9) In short, the accuracy of 2-gene Bayesian models created was measured by using only a “training” set (70% samples) to classify a left out “test” set (30% samples) into the 4 previously defined CIS groups (FIG. 1d). The mean accuracy after 10 randomized splits of the samples for the top 7 gene pairs was more than 80% (Table 5).

### 2. Clinical and Radiological Characteristics of the 4 CIS Groups

[0083] Patients from each of the 4 CIS transcriptional groups did not differ significantly according to age, gender, ethnic background, time from initial clinical event, or HLA-DRB1*1501 status (FIG. 2a). In contrast, time to conversion into CDMS was significantly shorter in patients from group #1 (FIG. 2a). The proportional Cox-regression hazard ratio for patients in group #1 was 3.5 (95% confidence interval [1.4-8.8], p=0.008) indicating a much higher risk of MS conversion for these individuals. Gadolinium enhancement on brain MRI shortly after clinical presentation was significantly higher in patients from group #1 compared to those from other groups, also indicating a higher disease activity (FIG. 2a). However, only 58% of the patients in group #1 showed gadolinium enhancement within 3 months of diagnosis.

[0084] In order to evaluate the concordance of gene expression with neurodegeneration, it was investigated to what extent changes in brain volume differed across the four CIS groups. To avoid biases related to therapy, only the 15 patients who did not receive disease-modifying therapy during the first year after diagnosis were included in this analysis. Normalized brain parenchyma (nBPV), white matter (nWMV), grey matter (nGMV) and CSF (nCSFV) volumes were not significantly different among the 4 groups at baseline. However, hierarchical clustering of changes after 1 year in these quantitative MRI parameters segregated patients in two major groups (FIG. 2b). One group displayed higher volume change (i.e. increase in CSF and decrease in brain volume), indicating a larger degree of neurodegeneration. The other group was characterized by relatively low change in CSF or brain volume. Interestingly, all group #1 patients were clustered into the latter group (Chi-square test, p=0.01).

[0085] To further explore what information about conversion to MS is contained in gene expression at the CIS stage, a predictive model of survival (i.e. conversion to MS) was built based on supervised principal components (10). The resulting model contained mRNA gene products hybridizing to 28 probe sets set forth in Table 2 and allowed a segregation of CIS into high and low risk groups (FIG. 2c). The separation remained significant even after adjustment for age, gender, and HLA-DRB1*1501 status (data not shown). Patients segregated into the high risk group based on their gene expression (red line), converted to MS by 9 months of follow up. Remarkably, 11 out of the 12 patients from group #1 were clustered into the high-risk group, thus resulting in a sensitivity of 92% and a specificity of 86%. This confirms the previous observation that gene expression-based segregation of group #1 patients is associated with high risk of MS conversion.

### 3. Gene Expression Still Differentiates Group #1 from Other CIS Patients a Year Later

[0086] Differential gene expression observed shortly after CIS diagnosis may either reflect an acute and transient biological response to the disease and/or a predisposing causative signature. To investigate this further and to confirm our observations, samples from the same individuals where collected and processed one year (mean 11+/−3 months) after diagnosis of CIS. For this follow-up, 31 CIS and 9 controls were available. Hierarchical clustering of these samples performed with the same 1,718 genes identified at baseline still discriminated CIS from controls (FIG. 4a). Among them, differential expression in 461 transcripts was statistically significant, including 270 (59%) of the 975 genes originally found to be differentially expressed at baseline (FIG. 4b). Remarkably, the first split of the samples' dendrogram segregated 100% of the previously identified group #1 patients from the rest of CIS patients and controls (Yellow box, FIG. 4a). In contrast, previously identified CIS groups #2, #3 and #4 were no longer detected. In order to measure the robustness of group #1 signature along time, a support vector machine (SVM) classifier (with 10-fold leave-one-out crossvalidation) with the 108 expression values obtained at baseline (training set) was built and used to predict the status of samples obtained at 12 months (test set). This model classified group #1 samples at baseline with 100% accuracy, positive predictive value (PPV), and negative predictive value (NPV) (FIG. 4c). After 12 months, the same model was able to predict group #1 patients with an accuracy of 86%, a PPV of 78% and a NPV of 90% (FIG. 4c). Altogether these results suggest that the molecular signature found in naïve CD4+ T cells of group #1 CIS patients is stable for at least 1 year.

### 4. TOB1 Abrogates T Cell Quiescence

[0087] Because group #1 signature persists along time, focus lay on this group which also appears to constitute a relatively consistent biological entity. Among the RNA gene products hybridizing to the 975 probe sets set forth in Table 4 whose expression differentiates CIS from controls at baseline, RNA gene products hybridizing to 108 probe sets set forth in Table 1A were also differentially expressed between group #1 and the other CIS groups combined (FIG. 2d, Table 6). With the exception of a ribosomal protein (RPL37A), the most under-expressed gene in group#1 patients was TOB1 (transducer of ERBB-2, 1) a finding confirmed by RT-PCR (FIG. 3a). TOB1 is a member of the APRO (anti-proliferative) family and has been shown to repress T cell proliferation (11). A strong downregulation of TOB1 upon in-vitro activation of peripheral-blood CD4+ T cells from control individuals (n=3, FIG. 3b) was observed, which is in accordance with previous studies (12). To examine whether downregulation of TOB1 is associated with T cell proliferation in-vivo, C57/B16 mice were immunized with either MOG₃₅₋₅₅ or CFA and investigated TOB1 protein levels in the lymph nodes by immunofluorescence. In agreement with the molecular and in-vitro data, TOB1 immunostaining was decreased in both groups 3 days after immunization while higher levels of the protein were detected in the lymph nodes of naïve mice (FIG. 3c). These results suggest that TOB1 downregulation can be detected as T cells proliferate in response to either a specific (MOG peptide) or unspecific (CFA) antigenic stimulus.

[0088] C57/B16 mice injected with MOG₃₅₋₅₅ reproducibly develop experimental autoimmune encephalomyelitis (EAE), a widely-employed laboratory model for MS. In contrast to the sustained inflammation endured by animals with EAE, the response to CFA is expected to be transient and it was hypothesized that patterns of Tob1 expression should reflect this difference. To test this hypothesis, the database from two previous experiments was searched, in which high throughput gene expression in lymph nodes and spinal cords at the peak of EAE was measured (13, 14). As expected, Tob1mRNA expression was decreased in both lymph nodes and spinal cords of EAE animals compared to CFA controls (FIG. 3d).

[0089] In addition to intra-molecular mechanisms, engagement of transmembrane receptors may contribute in regulating T cell homeostasis. Among the 3 differentially expressed genes coding for transmembrane receptors (SIGLEC10, EMR1 and CD44) only CD44, was over-expressed in CIS patients (Table 6). This upregulation was confirmed by qRT-PCR (FIG. 3e). Of interest, CD44 serves as a receptor for osteopontin (OPN or SPP1), a pleiotropic molecule that has been shown to be highly expressed in both MS plaques and EAE lesions (15). OPN acts as a key promoter of disease severity in EAE by directing the differentiation and survival of Thl cells (16). Plasma OPN levels in CIS group #1 patients were significantly higher than both other CIS and controls (FIG. 3f).

[0090] Since CIS patients classified as group #1 converted to CDMS earlier than other CIS patients, it was hypothesized that TORI is also implicated in the progression of disease once established. A genetic effect would be then expected in CDMS patients showing extreme phenotypes (mild or severe). This hypotheses was tested by genotyping 5 SNPs located within or near the gene (FIG. 4g) in individuals selected from a cohort of more than 1,200 RRMS patients that were clinically classified as either “mild” (EDSS<3 15 years after onset, n=62) or “severe” (EDSS>6 10 years after onset, n=74). Allelic frequencies were analyzed by logistic regression and case-control association. Differences in allelic frequencies for marker rs4626 (coding, synonymous) between mild and severe cases were statistically significant by logistic regression for both genotype and trend tests (marker rs7221352 also showed both effects although without reaching statistical significance). The same two markers showed statistical significance in the allele case-control (mild vs. severe) analysis (Table 7). Haplotype analysis with these two markers also showed statistical significance when the associated, but not the neutral alleles were considered (G-A, exact p-value=0.0115; A-G, exact p-value=0.0353). Altogether this data suggests that while TORI downregulation identifies CIS patients at higher risk of conversion to CDMS, there is also a genetic association between markers in this gene and the clinical progression of CDMS patients.

### 5. Patients and Samples

[0091] The study cohort consisted of 37 untreated CIS patients and 29 healthy control subjects matched for age and sex, evaluated at the UCSF Multiple Sclerosis Center. CIS patients were identified as subjects presenting with a first well-defined, neurological event persisting for more than 48 hours involving the optic nerve, brain parenchyma, brainstem, cerebellum, or spinal cord. All CIS patients demonstrated at least two abnormalities on brain MRI measuring greater than 3 mm². Patients were followed for an average of 20 (+/−8) months. Time to conversion was defined as the delay between recruitment and next clinical event or the date of identified MRI changes fulfilling the McDonald criteria (5). Written informed consent was obtained from all study participants.

### 6. Magnetic Resonance Imaging

[0092] MRI scans for all subjects were acquired on a 1.5 T GE (GE) MRI scanner with a standard head coil. All CIS subjects were scanned every 3 months during the first year of follow-up and then every 6 months during the second year. T2 hyperintense lesions were identified on simultaneously viewed T2 and proton density-weighted dual echo (1 mm×1 mm×3 mm pixels, interleaved slices, 20 ms and 80 ms echo times) images with regions of interest drawn based on a semi-automated threshold with manual editing as described elsewhere (26) Annual percent brain volume change (PBVC) was calculated from high resolution 3D T1-weighted spoiled gradient recalled echo volumes (pixel size of 1 mm×1 mm×1.5 mm, 124 slices, flip angle 40°) using SIENA (27).

### 7. RNA Preparation and Hybridization

[0093] Blood samples were collected at the time of recruitment into the study (baseline) and after 12 months. Peripheral blood mononuclear cells (PBMC) were separated on a Ficoll gradient and frozen in liquid nitrogen until needed. Naïve CD4+ T cells were isolated by negative selection using Dynabeads® (Invitrogen). CD4+ T cells purity was assessed by FACS (>95%, data not shown). RNA was then extracted using RNeasy® Mini kit (Quiagen), amplified with MessageAmp™ II a RNA kit (Ambion) and labeled with Bio-11-UTP for subsequent hybridization onto Affymetrix® Human Genome U133 Plus2.0 arrays (TGEN). Thus, the probe set identifier numbers set forth in the Tables below (including Tablesl8, 19, 1A, 2, 4, 8 and 13) are in reference to Affymetrix® Human Genome U133 Plus2.0 arrays.

### 8. Statistical Analysis

[0094] Quality control (QC) analysis of the arrays was performed using the Bioconductor package, available at the bioconductor.org website. In order to pass QC, arrays had to have at least 40% of their probe sets called present and had to have similar RNA degradation slopes, GAPDH and beta-actin ratios, scaling factors, histograms and box plot of intensities. Arrays were normalized using RMA (28). Statistical analyses were carried out using BRB-array Tools (Biometrics Research Branch, NIH). For multiple comparison correction, genes were considered differentially expressed if the univariate p-value was less than 0.001 and False discovery rate (FDR) less than 0.1 (29). Genes predicting MS conversion were determined using the Survival Analysis Prediction Tool of BRB-array Tools. The 2 survival risk groups were built using PCA with a p-value set at 0.001 for univarietely correlated genes with survival and leave-one-out-cross validation. (10) For cases with above and below average risk (50^{th} percentile) Kaplan-Meier survival curves were used. Hierarchical clustering was performed using Genes@work® software (IBM Research). To gauge robustness in the classification, the dataset was perturbed by adding random (white) Gaussian noise using the median variance of the dataset and re-clustered the samples 100 times. The index of robustness is the mean percentage of times a pair of samples remained in the same cluster. To investigate the likelihood that segregation into 4 groups occurred by chance, the Integrated Bayesian Inference System (IBIS) was used, which is a supervised machine learning approach (9).

### 9. Univariate and Multivariate Statistical Models

[0095] In order to calculate the marker to GAPDH ratio in a patient, univariate and multivariate statistical models are used. In univariate statistical models, the characteristic of each individual gene in classifying samples as being high or low risk genes is determined. In multivariate models, the best possible combination of two or more genes that can maximize the positive predictive value (PPV) or negative predictive value (NPV) is established. The positive predictive value, is defined as the number of true positives per total of true and false positives, whereas the negative predictive value describes the number of true negatives per total of true negatives and false negatives. Applying this statistical model provides methods to discriminate between high risk and low risk patients.

[0096] As discussed above, 108 probe sets were identified (Table 1A) by T-test analysis that hybridized to gene products that were differentially expressed between group#1 and other subjects. And 28 probe sets were identified (Table 2) by principal-component-based survival analysis that hybridized to gene products that were differentially expressed by high risk CIS patients. The combined set of 136 probe sets (108+28) were used to search for classifiers that could discriminate between the two groups with a reduced number of genes. Using compound covariate predictor (CCP), diagonal linear discriminant analysis (DLDA), and support vector machines (SVM) classifiers (see below), 13 probe sets were identified (Table 8) that hybridized to gene products that were differentially expressed. The CCP, DLDA and SVM were run with default parameters and within the BRB array tools application available from the National Cancer Institute. For each classifier a specific weight was assigned to each probe set as set forth in Table 9. The expression value of each probe set was normalized by that of two housekeeping (HK) genes: GAPDH and ACTB, with the results are provided in Tables 10A to 12C, which detail the predictive value of the statistical model by providing the number of CIS patients that developed MS within nine months (MS) and the number that did not develop MS within nine months (No MS) and the corresponding prediction based on the threshold value.

[0097] An independent (network-based) search was conducted based on the hypothesis that groups of genes whose products interact physically are likely to define biologically functional modules, as described in Ideker, T., et al. (2002). “Discovering regulatory and signalling circuits in molecular interaction networks.” Bioinformatics 18 Suppl 1: S233-40. Unlike with classical statistical analyses, identification of these modules allows for direct biological interpretation of the results. Briefly, we implemented a sub-network identification tool based on the algorithm previously described by Ideker et al. to identify groups of functionally related genes that could classify high versus low risk CIS patients. This algorithm consists of the following steps. First, a protein interaction database was downloaded locally. Second, starting from each node in the network, a sub-network was recursively grown by the addition of one neighboring node at a time. At each step, a scoring function was computed based on the mutual information between the weighted average of the expression values of all nodes considered at this step, and the vector of phenotypes (case versus control, high vs. low risk, etc). Third, the sub-network continued to grow until addition of a new node did not increase the score significantly. Three classifiers were constructed using the CCP, DLDA, and SVM algorithms. The network based search resulted in the identification of 6 probe sets (Table 13) that hybridized to gene products that were differentially expressed. For each classifier a specific weight was assigned to each probe set as set forth in Table 14. The expression value of each probe set was normalized by that of two housekeeping (HK) genes: GAPDH and ACTB. The predictive value and threshold values for the 6 probe sets were calculated, with the results provided in Table 15A to 17C, which detail the predictive value of the statistical model by providing the number of CIS patients that developed MS within nine months (MS) and the number that did not develop MS within nine months (No MS) and the corresponding prediction based on the threshold value.

[0098] The compound covariate predictor (CCP) used in the above studies is a weighted linear combination of log-ratios (or log intensities for single-channel experiments) for genes that are univariately significant at the specified level. By specifying a more stringent significance level, fewer genes are included in the multivariate predictor. Genes in which larger values of the log-ratio pre-dispose to class 2 rather than class 1 have weights of one sign, whereas genes in which larger values of the log-ratios pre-dispose to class 1 rather than class 2 have weights of the opposite sign. The univariate t-statistics for comparing the classes are used as the weights. The CCP is described in further detail in Radmacher M D, McShane L M, and Simon R. A paradigm for class prediction using gene expression profiles. Journal of Computational Biology 9:505-511, 2002; and I Hedenfalk, D Duggan, Y Chen, M Radmacher, M Bittner, R Simon, P Meltzer, B Gusterson, M Esteller, M Raffeld, et al. Gene expression profiles of hereditary breast cancer, New England Journal of Medicine 344:539-548, 2001.

[0099] The Diagonal Linear Discriminant Analysis (DLDA) used in the above studies is similar to the Compound Covariate Predictor, but not identical. It is a version of linear discriminant analysis that ignores correlations among the genes in order to avoid over-fitting the data. Many complex methods have too many parameters for the amount of data available. Consequently they appear to fit the training data used to estimate the parameters of the model, but they have poor prediction performance for independent data. The DLDA is described in further detail in McLachlan G J. Discriminant Analysis and Statistical Pattern Recognition Wiley-Interscience; New Ed edition (Aug. 4, 2004); and Dudoit S, Fridlyand J, Speed T P. Comparison of discrimination methods for the classification of tumors using gene expression data, Journal of the American Statistical Association 97:77-87, 2002).

[0100] The support vector machine (SVM) used in the above studies is a class prediction algorithm that has appeared effective in other contexts and is currently of great interest to the machine learning community. The SVM predictor can employ a variety of functions, as known in the art. In some embodiments, the SVM predictor is a linear function of the log-ratios or the log-intensities that best separates the data subject to penalty costs on the number of specimens misclassified. The SVM is described in further detail in Vapnik V. The Nature of Statistical Learning Theory. Springer-Verlag, 1995.

### 10. Quantitative RT-PCR

[0101] Master mix was prepared essentially as described previously, (9) with the addition of 200 μM ROX (Sigma), and overlaid on top of each well of a freshly thawed 384-well plate containing 5 ng of RNA in each well. Reactions were performed in triplicates using an ABI 7900 Sequence Detection System (Applied Biosystems).

### 11. Immunofluorescence and ELISA

[0102] Draining lymph nodes from either naive or injected (MOG₃₅₋₅₅ or CFA alone) C57/B16 mice were removed, washed in PBS and then embedded in OCT and frozen. Sections were cut at 6 μm on a cryostat and stained for immunofluorescence examination using either a rabbit anti-TOB1 polyclonal antibody (H-70, Santa Cruz Biotechnology Inc. CA), or a purified rat anti CD4 antibody (BD Pharmingen). Secondary antibodies were anti-rabbit Alexa 488 (Molecular Probes, Eugene Oreg.) and anti-rat Alexa 594 (Molecular Probes). ELISAs for OPN were carried out using the Quantikine kit (R&D Systems) according to manufacturer's instructions.

### 12. Genotyping of TOB1 SNPs

[0103] Five single nucleotide polymorphisms (SNP) located within or near TOB1 were selected for genotyping in 62 mild and 74 severe MS patients. Mild disease was defined as EDSS<3 after 15 years of onset while severe was defined as EDSS>6 after 10 years of onset. Genotyping assays were carried out in 384-well plates using TaqMan® Universal PCR Master Mix on an ABI GeneAmp PCR System 7900 (Applied Biosystems). Statistical tests were carried out in SAS and Jmp Genomics suite (SAS). For haplotype analysis, exact p-values were calculated using the EM algorithm in a Monte Carlo approach with 10,000 permutations.

### 13. Tables

[0104] Tables 1-19 follow. Tables 1A, 1B and 2 provide differential gene expression analysis data. Table 3 provides data regarding subject characteristics at baseline. Table 4 provides a list of 975 genes differentially expressed between CIS and controls at baseline. Table 5 provides data regarding mean predictive accuracy of the top seven gene pairs. Table 6 provides data relating to the signature of group #1 patients. And Table 7 provides genotyping data of 5 TOB1 SNP in patients with mild (n=62) or severe (n=74) MS. Tables 9 to 19 present data resulting form the statistical model analysis as described herein. Terms used in the tables are as follows: The term “SD” in the context of statistical analysis refers to the standard deviation, as known in the art. The term “Ave.” refers to the statistical average, as known in the art. The term “Grpl” refers to Group #1 as described herein.

### IV. References

[0105] 1. Hauser S L & Goodin D S (2005) in Harrison's Principles in Internal Medicine, eds. Braunwald E, Fauci A D, Kasper D L, Hauser S L, Longo D L, & Jameson J L (McGraw-Hill, New York), pp. 2461-2471.
[0106] 2. Kappos L, et al. (2006) Treatment with interferon beta-1b delays conversion to clinically definite and McDonald M S in patients with clinically isolated syndromes. Neurology 67, 1242-1249.
[0107] 3. Korteweg T, et al. (2006) MRI criteria for dissemination in space in patients with clinically isolated syndromes: a multicentre follow-up study. Lancet Neurol 5, 221-227.
[0108] 4. Brex P A, et al. (2002) A longitudinal study of abnormalities on MRI and disability from multiple sclerosis. N Engl J Med 346, 158-164.
[0109] 5. McDonald W I, et al. (2001) Recommended diagnostic criteria for multiple sclerosis: guidelines from the International Panel on the diagnosis of multiple sclerosis. Ann Neurol 50, 121-127.
[0110] 6. Satoh J, et al. (2005) Microarray analysis identifies an aberrant expression of apoptosis and DNA damage-regulatory genes in multiple sclerosis. Neurobiol Dis 18, 537-550.
[0111] 7. Satoh J, et al. (2006) T cell gene expression profiling identifies distinct subgroups of Japanese multiple sclerosis patients. J Neuroimmunol 174, 108-118.
[0112] 8. Kantor A B, et al. (2007) Identification of short-term pharmacodynamic effects of interferon-beta-1a in multiple sclerosis subjects with broad-based phenotypic profiling. J Neuroimmunol 188, 103-116.
[0113] 9. Baranzini SE, et al. (2005) Transcription-based prediction of response to IFNbeta using supervised computational methods. PLoS Biol 3, e2.
[0114] 10. Bair E & Tibshirani R (2004) Semi-supervised methods to predict patient survival from gene expression data. PLoS Biol 2, E108.
[0115] 11. Tzachanis D, et al. (2001) Tob is a negative regulator of activation that is expressed in anergic and quiescent T cells. Nat Immunol 2, 1174-1182.
[0116] 12. Yusuf I & Fruman D A (2003) Regulation of quiescence in lymphocytes. Trends Immunol 24, 380-386.
[0117] 13. Baranzini S E, Bernard C C, & Oksenberg J R (2005) Modular transcriptional activity characterizes the initiation and progression of autoimmune encephalomyelitis. J Immunol 174, 7412-7422.
[0118] 14. Otaegui D, et al. (2007) Increased transcriptional activity of milk-related genes following the active phase of experimental autoimmune encephalomyelitis and multiple sclerosis. J Immunol 179, 4074-4082.
[0119] 15. Chabas D, et al. (2001) The influence of the proinflammatory cytokine, osteopontin, on autoimmune demyelinating disease. Science 294, 1731-1735.
[0120] 16. Hur E M, et al. (2007) Osteopontin-induced relapse and progression of autoimmune brain disease through enhanced survival of activated T cells. Nat Immunol 8, 74-83.
[0121] 17. Tintoré M, et al. (2001) Isolated demyelinating syndromes: comparison of CSF oligoclonal bands and different MR imaging criteria to predict conversion to CDMS. Multiple Sclerosis 7, 359-363.
[0122] 18. Berger T, et al. (2003) Antimyelin antibodies as a predictor of clinically definite multiple sclerosis after a first demyelinating event. N Engl J Med 349, 139-145.
[0123] 19. Kuhle J, et al. (2007) Lack of association between antimyelin antibodies and progression to multiple sclerosis. N Engl J Med 356, 371-378.
[0124] 20. Orban T, et al. (2007) Reduced CD4+T-cell-specific gene expression in human type 1 diabetes mellitus. J Autoimmun 28, 177-187.
[0125] 21. Tzachanis D, Lafuente E M, Li L, & Boussiotis V A (2004) Intrinsic and extrinsic regulation of T lymphocyte quiescence. Leuk Lymphoma 45, 1959-1967.
[0126] 22. Matsuoka S, et al. (1995) p57KIP2, a structurally distinct member of the p21CIP1 Cdk inhibitor family, is a candidate tumor suppressor gene. Genes Dev 9, 650-662.
[0127] 23. Plon S E, Leppig K A, Do H N, & Groudine M (1993) Cloning of the human homolog of the CDC34 cell cycle gene by complementation in yeast. Proc Natl Acad Sci USA 90, 10484-10488.
[0128] 24. Ousman SS, et al. (2007) Protective and therapeutic role for alphaB-crystallin in autoimmune demyelination. Nature 448, 474-479.
[0129] 25. Vogt M H, Lopatinskaya L, Smits M, Polman C H, & Nagelkerken L (2003) Elevated osteopontin levels in active relapsing-remitting multiple sclerosis. Ann Neurol 53, 819-822.
[0130] 26. Blum D, et al. (2002) Dissociating perceptual and conceptual implicit memory in multiple sclerosis patients. Brain Cogn 50, 51-61.
[0131] 27. Smith S M, De Stefano N, Jenkinson M, & Matthews P M (2001) Normalized accurate measurement of longitudinal brain change. J Comput Assist Tomogr 25, 466-475.
[0132] 28. Irizarry R A, et al. (2003) Summaries of Affymetrix GeneChip probe level data. Nucleic Acids Res 31, e15.
[0133] 29. Benjamini Y & Hochberg Y (1995) Controlling the false discovery rate: a practical and powerful approach to multiple testing. J Roy Stat Soc, 289-300.

TABLE 1A

| | SEQ | | | | Ave. | SD | Ave. |
|---|---|---|---|---|---|---|---|
| Probe set | ID | Marker | Ave. Healthy | | Other | Other | Grp1 |
| Identifier | NO: | Gene | Control | SD Control | CIS | CIS | CIS |
| 217800_s_at | 2 | NDFIP1 | 96.7104533 | 95.75572795 | 254.1 | 321.0 | 713.3 |
| 225247_at | 298 | C19orf6 | 912.8038675 | 351.313034 | 569.7 | 511.6 | 1129.8 |
| 213915_at | 782 | NKG7 | 3748.392227 | 1002.109043 | 1319.4 | 1386.3 | 2381.9 |
| 200041_s_at | 981 | BAT1 | 1737.677862 | 498.0604971 | 2149.6 | 717.0 | 5253.8 |
| 211716_x_at | 1000 | ARHGDIA | 503.0587478 | 199.7016131 | 285.1 | 138.0 | 645.9 |
| 233350_s_at | 300 | TEX264 | 268.0886963 | 55.50046736 | 166.9 | 114.4 | 318.7 |
| 219529_at | 767 | CLIC3 | 110.284748 | 62.05526861 | 35.3 | 46.3 | 65.4 |
| 218607_s_at | 116 | SDAD1 | 143.2487323 | 58.87369449 | 220.0 | 71.4 | 494.5 |
| 202652_at | 290 | APBB1 | 183.2648549 | 49.83218809 | 125.7 | 92.2 | 240.7 |
| 216520_s_at | 138 | TPT1 | 3074.723831 | 3156.269061 | 5236.5 | 2877.9 | 10048.5 |
| 1554021_a_at | 83 | ZNF12 | 30.66688733 | 25.15376602 | 50.1 | 26.5 | 105.6 |
| 204122_at | 900 | TYROBP | 1201.644912 | 376.3319175 | 297.3 | 276.5 | 631.7 |
| 219878_s_at | 504 | KLF13 | 234.6876124 | 59.46239858 | 103.4 | 69.4 | 186.2 |
| 216231_s_at | 242 | B2M | 2860.485868 | 2244.297121 | 4205.6 | 2244.5 | 7880.0 |
| 219571_s_at | 106 | ZNF12 | 23.83333559 | 17.59710007 | 40.5 | 21.0 | 78.8 |
| 214450_at | 879 | CTSW | 1945.934778 | 615.1646128 | 598.0 | 533.2 | 1000.7 |
| 209050_s_at | 997 | RALGDS | 1261.540654 | 316.197773 | 581.1 | 336.9 | 1008.0 |
| 207088_s_at | 992 | SLC25A11 | 297.0283211 | 83.80094822 | 133.2 | 91.3 | 219.7 |
| 1558215_s_at | 71 | UBTF | 27.89662742 | 3.518774288 | 48.0 | 21.6 | 94.5 |
| 200612_s_at | 982 | AP2B1 | 138.6467451 | 46.11948903 | 60.8 | 37.4 | 106.1 |
| 227266_s_at | 257 | FYB | 741.2284544 | 471.163392 | 1058.4 | 415.7 | 1915.2 |
| 205480_s_at | 251 | UGP2 | 567.3176781 | 417.2804445 | 873.5 | 456.7 | 1479.2 |
| 201831_s_at | 213 | VDP | 80.079115 | 44.53736077 | 131.7 | 83.7 | 197.4 |
| 232535_at | 102 | unknown | 17.36604383 | 7.047231356 | 30.9 | 18.5 | 50.0 |
| 244042_x_at | 269 | unknown | 19.88215621 | 7.090260074 | 27.2 | 13.4 | 44.9 |
| 233713_at | 88 | SMYD2 | 35.51625337 | 19.31566529 | 70.1 | 26.5 | 121.3 |
| 211947_s_at | 1001 | BAT2D1 | 315.6667419 | 98.165398 | 142.4 | 52.4 | 241.4 |
| 212368_at | 152 | ZNF292 | 208.4753741 | 103.8816828 | 355.0 | 132.7 | 591.8 |
| 217854_s_at | 573 | POLR2E | 530.0863493 | 113.1975464 | 228.7 | 123.5 | 338.5 |
| 217993_s_at | 96 | MAT2B | 792.2890998 | 587.4647981 | 1582.2 | 714.0 | 2428.0 |
| 236562_at | 154 | ZNF439 | 26.29907812 | 19.04974141 | 45.3 | 19.0 | 71.7 |
| 200033_at | 217 | DDX5 | 3216.520811 | 2823.244939 | 5342.3 | 1586.0 | 8366.5 |
| 221895_at | 225 | MOSPD2 | 130.2392647 | 53.59154667 | 207.4 | 113.6 | 300.4 |
| 201998_at | 987 | ST6GAL1 | 373.7283149 | 190.1599525 | 622.2 | 291.5 | 921.2 |
| 209458_x_at | 971 | HBA1 /// | 804.5334775 | 1999.83385 | 50.0 | 11.6 | 99.4 |
| | | HBA2 | | | | | |
| 241838_at | 40 | unknown | 18.36391457 | 7.052024714 | 39.7 | 19.0 | 63.1 |
| 212540_at | 553 | CDC34 | 321.9275865 | 108.6345653 | 154.4 | 90.3 | 205.2 |
| 212926_at | 164 | SMC5L1 | 84.03206343 | 34.70164192 | 148.2 | 60.6 | 212.6 |
| 202283_at | 769 | SERPINF1 | 111.5260189 | 47.52765099 | 39.0 | 16.3 | 55.9 |
| 200735_x_at | 220 | NACA | 4139.886031 | 2666.221608 | 6913.5 | 1798.1 | 10231.1 |
| 207460_at | 617 | GZMM | 273.0278916 | 93.2137522 | 119.0 | 60.6 | 172.0 |
| 211699_x_at | 967 | HBA1 /// | 577.6797877 | 1613.670589 | 60.9 | 11.9 | 109.1 |
| | | HBA2 | | | | | |
| 208635_x_at | 214 | NACA | 3965.432116 | 2515.963282 | 6736.1 | 1672.7 | 9872.6 |
| 209651_at | 664 | TGFB1I1 | 44.654309 | 20.81058608 | 18.2 | 8.3 | 26.3 |
| 213687_s_at | 165 | RPL35A | 4375.141279 | 2306.488539 | 8120.3 | 1748.7 | 11464.2 |
| 208325_s_at | 882 | AKAP13 | 126.3933081 | 65.66546784 | 36.9 | 11.2 | 57.1 |
| 203375_s_at | 988 | TPP2 | 210.7686166 | 172.6152428 | 324.6 | 134.0 | 449.2 |
| 212063_at | 275 | CD44 | 990.7506707 | 659.8373057 | 1473.5 | 437.5 | 2055.2 |
| 235213_at | 76 | ITPKB | 779.1840666 | 419.5630058 | 1628.2 | 546.5 | 2254.6 |
| 242778_at | 869 | LPXN | 143.6867555 | 84.59695649 | 59.5 | 14.7 | 42.4 |
| 226843_s_at | 884 | PAPD5 | 1910.356104 | 604.1972303 | 798.7 | 245.3 | 547.5 |
| 1569599_at | 578 | SAMSN1 | 28.48629113 | 17.16502805 | 17.2 | 7.8 | 11.0 |
| 207111_at | 669 | EMR1 | 320.6728923 | 146.2818122 | 189.0 | 105.6 | 117.8 |
| 242918_at | 969 | NASP | 124.1118889 | 98.43225996 | 14.1 | 4.0 | 8.9 |
| 1553861_at | 976 | TCP11L2 | 79.22827834 | 43.09611716 | 53.2 | 20.4 | 35.9 |
| 1552807_{'}a_at | 765 | SIGLEC10 | 441.6801421 | 231.9664661 | 219.6 | 108.4 | 132.0 |
| 238545_at | 903 | BRD7 | 1116.910287 | 438.1978068 | 484.6 | 267.0 | 276.9 |
| 202381_at | 433 | ADAM9 | 87.37622443 | 53.85995502 | 63.3 | 36.7 | 35.1 |
| 226982_at | 353 | ELL2 | 448.6067163 | 238.3580447 | 357.9 | 288.0 | 199.1 |
| 202083_s_at | 937 | SEC14L1 | 358.4116609 | 132.1558944 | 125.7 | 71.6 | 69.6 |
| 228284_at | 844 | TLE1 | 223.8286885 | 116.1536573 | 101.7 | 47.2 | 58.4 |
| 222670_s_at | 842 | MAFB | 550.2143555 | 376.934896 | 253.1 | 185.0 | 134.5 |
| 243296_at | 396 | PBEF1 | 342.8300274 | 212.2533748 | 249.0 | 103.5 | 151.6 |
| 212840_at | 104 | KIAA0794 | 199.0536987 | 76.5416961 | 534.8 | 154.3 | 303.4 |
| 1564164_at | 11 | FLJ20054 | 64.23388467 | 26.88863142 | 269.5 | 152.2 | 139.3 |
| 204566_at | 990 | PPM1D | 356.2707527 | 120.3061939 | 314.0 | 182.3 | 160.5 |
| 226643_s_at | 184 | LOC134492 | 34.19986774 | 8.400359057 | 91.7 | 45.4 | 46.0 |
| 228049_x_at | 420 | unknown | 443.0962527 | 126.90203 | 326.6 | 127.9 | 167.2 |
| 217602_at | 1010 | PPIA | 30.95187262 | 11.59178375 | 28.2 | 17.8 | 14.4 |
| 215023_s_at | 530 | PEX1 | 64.51736193 | 26.93983789 | 48.4 | 30.2 | 21.4 |
| 1567213_at | 980 | PNN | 215.39985 | 61.15043081 | 567.9 | 244.8 | 296.4 |
| 209160_at | 845 | AKR1C3 | 443.6579502 | 176.6915813 | 214.3 | 164.7 | 121.1 |
| 205789_at | 376 | CD1D | 49.13639343 | 37.70100424 | 40.5 | 34.7 | 16.2 |
| 208750_s_at | 430 | ARF1 | 103.527944 | 48.2379301 | 94.7 | 84.8 | 39.1 |
| 201151_s_at | 983 | MBNL1 | 49.3888033 | 17.65848473 | 159.4 | 115.2 | 69.2 |
| 212649_at | 1003 | unknown | 25.30370743 | 4.159717144 | 66.1 | 32.3 | 28.8 |
| 229733_s_at | 634 | CBX6 | 76.97125046 | 63.26817093 | 47.5 | 35.4 | 19.9 |
| 203603_s_at | 346 | ZFHX1B | 218.4495249 | 85.64500979 | 185.3 | 110.2 | 99.8 |
| 201110_s_at | 858 | THBS1 | 62.01388044 | 51.89044949 | 29.1 | 23.0 | 11.1 |
| 1555226_s_at | 554 | C1orf43 | 89.84621232 | 47.08814838 | 73.1 | 64.2 | 26.8 |
| 1559249_at | 593 | ATXN1 | 276.8801913 | 158.5949281 | 176.0 | 77.6 | 81.6 |
| 204286_s_at | 502 | PMAIP1 | 556.8716059 | 379.3762268 | 370.4 | 158.6 | 188.5 |
| 229204_at | 34 | HP1-BP74 | 91.88550229 | 21.78105698 | 297.9 | 176.7 | 116.6 |
| 219099_at | 642 | C12orf5 | 458.0108323 | 140.7303981 | 289.3 | 121.0 | 133.9 |
| 213183_s_at | 320 | CDKN1C | 53.81104837 | 23.77523442 | 48.2 | 31.9 | 20.0 |
| 218611_at | 560 | IER5 | 2094.876848 | 559.6799384 | 1453.6 | 609.3 | 709.8 |
| 228638_at | 348 | MGC34648 | 182.675226 | 64.22871143 | 172.4 | 88.8 | 68.9 |
| 1566403_at | 931 | RNU68 | 124.0391022 | 72.95277998 | 52.4 | 32.4 | 20.8 |
| 227897_at | 624 | RAP2B | 307.3313058 | 148.2233283 | 206.6 | 146.5 | 69.8 |
| 229397_s_at | 1017 | GRLF1 | 25.12088088 | 5.38543903 | 56.8 | 35.8 | 20.7 |
| 216609_at | 1008 | TXN | 18.2023911 | 4.083091107 | 79.7 | 64.9 | 25.2 |
| 222487_s_at | 17 | RPS27L | 63.3711197 | 18.47674156 | 254.3 | 142.8 | 95.4 |
| 228746_s_at | 704 | H41 | 84.49107472 | 54.63100835 | 58.6 | 52.2 | 16.5 |
| 230659_at | 1019 | EDEM1 | 36.79235659 | 22.52157399 | 37.3 | 26.1 | 11.4 |
| 213872_at | 886 | C6orf62 | 87.18546287 | 74.51211865 | 45.4 | 49.0 | 12.5 |
| 228030_at | 408 | RBM6 | 66.92784638 | 49.99393716 | 61.5 | 53.5 | 15.0 |
| 230333_at | 936 | SAT | 234.8209456 | 199.3058577 | 112.6 | 128.3 | 24.8 |
| 201694_s_at | 558 | EGR1 | 1065.285188 | 523.6056069 | 866.5 | 680.4 | 345.6 |
| 227404_s_at | 685 | EGR1 | 166.0581387 | 133.9676263 | 124.8 | 120.2 | 34.3 |
| 212834_at | 292 | DDX52 | 244.079041 | 86.75908123 | 270.5 | 108.5 | 87.8 |
| 231193_s_at | 3 | unknown | 17.49654557 | 3.314087173 | 96.4 | 66.9 | 24.1 |
| 1559343_at | 978 | UBE3A | 7.560112145 | 1.222277847 | 24.5 | 14.8 | 6.6 |
| 244546_at | 666 | CYCS | 301.7642436 | 118.4016892 | 192.9 | 113.9 | 58.2 |
| 220494_s_at | 618 | unknown | 112.3873397 | 101.6367982 | 81.8 | 60.9 | 19.3 |
| 232392_at | 910 | SFRS3 | 414.1451007 | 246.2652346 | 208.8 | 161.8 | 41.6 |
| 228834_at | 876 | TOB1 | 272.4410487 | 230.8314357 | 153.0 | 179.5 | 21.2 |
| 214395_x_at | 1006 | EEF1D | 96.3768725 | 25.79618187 | 348.5 | 288.0 | 68.6 |
| 214041_x_at | 1004 | RPL37A | 13.48090589 | 4.930513681 | 124.5 | 134.2 | 10.4 |

| | | | | | T-test |
|---|---|---|---|---|---|
| | | Gene/ | | Gene/ | P-value |
| | SD | GAPDH | Gene/ | GAPDH | Grp1 vs. |
| Probe set | Grp1 | Healthy | GAPDH | Grp1 | Other |
| Identifier | CIS | Controls | Other CIS | CIS | CIS |
| 217800_s_at | 209.6 | 16.90 | 79.07 | 237.42 | 9.79E−05 |
| 225247_at | 320.9 | 159.54 | 177.28 | 376.04 | 1.69E−03 |
| 213915_at | 1054.8 | 655.14 | 410.55 | 792.80 | 2.75E−02 |
| 200041_s_at | 840.1 | 303.71 | 668.87 | 1748.69 | 9.20E−13 |
| 211716_x_at | 157.4 | 87.92 | 88.71 | 214.99 | 7.47E−08 |
| 233350_s_at | 71.1 | 46.86 | 51.94 | 106.06 | 2.23E−04 |
| 219529_at | 42.5 | 19.28 | 10.99 | 21.77 | 7.21E−02 |
| 218607_s_at | 132.8 | 25.04 | 68.47 | 164.58 | 5.41E−09 |
| 202652_at | 76.4 | 32.03 | 39.12 | 80.12 | 8.52E−04 |
| 216520_s_at | 1252.3 | 537.40 | 1629.44 | 3344.55 | 4.83E−06 |
| 1554021_a_at | 23.6 | 5.36 | 15.58 | 35.15 | 8.96E−07 |
| 204122_at | 448.1 | 210.02 | 92.50 | 210.25 | 1.10E−02 |
| 219878_s_at | 53.6 | 41.02 | 32.19 | 61.98 | 1.12E−03 |
| 216231_s_at | 682.4 | 499.95 | 1308.66 | 2622.76 | 4.64E−06 |
| 219571_s_at | 20.3 | 4.17 | 12.60 | 26.21 | 1.33E−05 |
| 214450_at | 347.5 | 340.11 | 186.09 | 333.08 | 2.51E−02 |
| 209050_s_at | 163.0 | 220.49 | 180.83 | 335.52 | 2.54E−04 |
| 207088_s_at | 91.3 | 51.91 | 41.45 | 73.14 | 1.27E−02 |
| 1558215_s_at | 42.1 | 4.88 | 14.93 | 31.44 | 1.57E−04 |
| 200612_s_at | 48.4 | 24.23 | 18.91 | 35.30 | 4.71E−03 |
| 227266_s_at | 292.0 | 129.55 | 329.33 | 637.45 | 4.31E−07 |
| 205480_s_at | 305.9 | 99.16 | 271.81 | 492.34 | 2.61E−04 |
| 201831_s_at | 48.2 | 14.00 | 40.97 | 65.70 | 1.80E−02 |
| 232535_at | 21.8 | 3.04 | 9.62 | 16.64 | 1.09E−02 |
| 244042_x_at | 18.5 | 3.47 | 8.47 | 14.94 | 3.01E−03 |
| 233713_at | 33.3 | 6.21 | 21.83 | 40.39 | 2.51E−05 |
| 211947_s_at | 60.0 | 55.17 | 44.32 | 80.35 | 1.99E−05 |
| 212368_at | 176.3 | 36.44 | 110.47 | 196.97 | 1.05E−04 |
| 217854_s_at | 80.3 | 92.65 | 71.16 | 112.67 | 9.31E−03 |
| 217993_s_at | 516.9 | 138.48 | 492.32 | 808.13 | 1.03E−03 |
| 236562_at | 21.8 | 4.60 | 14.09 | 23.88 | 8.25E−04 |
| 200033_at | 443.0 | 562.18 | 1662.37 | 2784.71 | 3.15E−07 |
| 221895_at | 93.1 | 22.76 | 64.55 | 99.99 | 2.13E−02 |
| 201998_at | 216.5 | 65.32 | 193.61 | 306.62 | 3.94E−03 |
| 209458_x_at | 80.9 | 140.62 | 15.57 | 33.07 | 7.72E−03 |
| 241838_at | 28.0 | 3.21 | 12.37 | 20.99 | 6.91E−03 |
| 212540_at | 39.4 | 56.27 | 48.05 | 68.31 | 7.41E−02 |
| 212926_at | 49.3 | 14.69 | 46.12 | 70.75 | 3.53E−03 |
| 202283_at | 21.0 | 19.49 | 12.14 | 18.60 | 1.39E−02 |
| 200735_x_at | 866.5 | 723.57 | 2151.27 | 3405.33 | 1.11E−06 |
| 207460_at | 56.1 | 47.72 | 37.02 | 57.25 | 1.78E−02 |
| 211699_x_at | 72.2 | 100.97 | 18.94 | 36.30 | 4.12E−03 |
| 208635_x_at | 1066.2 | 693.07 | 2096.07 | 3286.00 | 1.64E−06 |
| 209651_at | 13.4 | 7.80 | 5.68 | 8.77 | 3.72E−02 |
| 213687_s_at | 919.9 | 764.68 | 2526.79 | 3815.75 | 7.09E−07 |
| 208325_s_at | 31.8 | 22.09 | 11.49 | 19.02 | 1.06E−02 |
| 203375_s_at | 103.7 | 36.84 | 101.01 | 149.53 | 8.79E−03 |
| 212063_at | 584.2 | 173.16 | 458.50 | 684.06 | 2.45E−03 |
| 235213_at | 782.6 | 136.19 | 506.64 | 750.43 | 1.00E−02 |
| 242778_at | 7.7 | 25.11 | 18.52 | 14.12 | 7.42E−04 |
| 226843_s_at | 138.1 | 333.89 | 248.54 | 182.23 | 2.62E−03 |
| 1569599_at | 2.1 | 4.98 | 5.36 | 3.65 | 1.12E−02 |
| 207111_at | 39.4 | 56.05 | 58.81 | 39.21 | 3.22E−02 |
| 242918_at | 2.1 | 21.69 | 4.39 | 2.97 | 2.19E−04 |
| 1553861_at | 15.1 | 13.85 | 16.54 | 11.96 | 1.54E−02 |
| 1552807_{'}a_at | 63.7 | 77.20 | 68.33 | 43.94 | 1.55E−02 |
| 238545_at | 78.9 | 195.21 | 150.80 | 92.15 | 1.34E−02 |
| 202381_at | 10.4 | 15.27 | 19.71 | 11.69 | 1.45E−02 |
| 226982_at | 99.3 | 78.41 | 111.38 | 66.26 | 7.50E−02 |
| 202083_s_at | 32.1 | 62.64 | 39.13 | 23.17 | 1.52E−02 |
| 228284_at | 28.6 | 39.12 | 31.64 | 19.43 | 6.86E−03 |
| 222670_s_at | 74.2 | 96.17 | 78.75 | 44.76 | 4.21E−02 |
| 243296_at | 83.2 | 59.92 | 77.47 | 50.45 | 8.67E−03 |
| 212840_at | 83.7 | 34.79 | 166.41 | 100.97 | 3.52E−05 |
| 1564164_at | 63.1 | 11.23 | 83.86 | 46.38 | 8.25E−03 |
| 204566_at | 51.1 | 62.27 | 97.71 | 53.43 | 7.81E−03 |
| 226643_s_at | 17.7 | 5.98 | 28.55 | 15.30 | 2.15E−03 |
| 228049_x_at | 36.1 | 77.44 | 101.62 | 55.66 | 1.99E−04 |
| 217602_at | 3.0 | 5.41 | 8.76 | 4.80 | 1.27E−02 |
| 215023_s_at | 5.0 | 11.28 | 15.05 | 7.11 | 4.52E−03 |
| 1567213_at | 98.8 | 37.65 | 176.71 | 98.66 | 8.98E−04 |
| 209160_at | 90.4 | 77.54 | 66.70 | 40.31 | 7.98E−02 |
| 205789_at | 5.1 | 8.59 | 12.61 | 5.41 | 2.27E−02 |
| 208750_s_at | 9.2 | 18.09 | 29.47 | 13.03 | 3.18E−02 |
| 201151_s_at | 24.4 | 8.63 | 49.61 | 23.02 | 1.20E−02 |
| 212649_at | 7.0 | 4.42 | 20.58 | 9.58 | 4.21E−04 |
| 229733_s_at | 3.4 | 13.45 | 14.77 | 6.64 | 1.18E−02 |
| 203603_s_at | 59.8 | 38.18 | 57.65 | 33.20 | 1.84E−02 |
| 201110_s_at | 3.8 | 10.84 | 9.06 | 3.71 | 1.19E−02 |
| 1555226_s_at | 9.1 | 15.70 | 22.76 | 8.90 | 1.90E−02 |
| 1559249_at | 30.2 | 48.39 | 54.78 | 27.17 | 3.23E−04 |
| 204286_s_at | 107.1 | 97.33 | 115.24 | 62.73 | 1.24E−03 |
| 229204_at | 23.1 | 16.06 | 92.70 | 38.82 | 1.34E−03 |
| 219099_at | 40.8 | 80.05 | 90.01 | 44.55 | 1.53E−04 |
| 213183_s_at | 4.6 | 9.41 | 15.01 | 6.65 | 4.84E−03 |
| 218611_at | 326.4 | 366.14 | 452.30 | 236.26 | 4.45E−04 |
| 228638_at | 19.2 | 31.93 | 53.64 | 22.93 | 3.90E−04 |
| 1566403_at | 6.9 | 21.68 | 16.31 | 6.92 | 2.23E−03 |
| 227897_at | 30.8 | 53.72 | 64.30 | 23.22 | 3.28E−03 |
| 229397_s_at | 5.7 | 4.39 | 17.68 | 6.90 | 1.60E−03 |
| 216609_at | 10.2 | 3.18 | 24.80 | 8.39 | 7.21E−03 |
| 222487_s_at | 45.2 | 11.08 | 79.12 | 31.76 | 7.44E−04 |
| 228746_s_at | 2.5 | 14.77 | 18.23 | 5.49 | 9.26E−03 |
| 230659_at | 2.3 | 6.43 | 11.60 | 3.79 | 1.81E−03 |
| 213872_at | 4.5 | 15.24 | 14.13 | 4.15 | 2.75E−02 |
| 228030_at | 2.6 | 11.70 | 19.13 | 4.99 | 5.39E−03 |
| 230333_at | 4.7 | 41.04 | 35.03 | 8.26 | 2.49E−02 |
| 201694_s_at | 314.0 | 186.19 | 269.63 | 115.03 | 1.78E−02 |
| 227404_s_at | 30.1 | 29.02 | 38.82 | 11.42 | 1.59E−02 |
| 212834_at | 31.0 | 42.66 | 84.17 | 29.23 | 2.80E−06 |
| 231193_s_at | 8.2 | 3.06 | 30.01 | 8.02 | 7.95E−04 |
| 1559343_at | 1.2 | 1.32 | 7.62 | 2.20 | 2.25E−04 |
| 244546_at | 36.9 | 52.74 | 60.02 | 19.39 | 3.91E−04 |
| 220494_s_at | 5.1 | 19.64 | 25.46 | 6.43 | 1.31E−03 |
| 232392_at | 15.3 | 72.38 | 64.97 | 13.86 | 1.23E−03 |
| 228834_at | 8.1 | 47.62 | 47.62 | 7.05 | 1.67E−02 |
| 214395_x_at | 22.4 | 16.84 | 108.44 | 22.82 | 2.15E−03 |
| 214041_x_at | 4.1 | 2.36 | 38.75 | 3.48 | 6.32E−03 |

TABLE 1B

| | | | | | | | | | Gene/ | Gene/ | Gene/ | T-test P- |
|---|---|---|---|---|---|---|---|---|---|---|---|---|
| | | | | | Ave. | SD | Ave. | SD | GAPDH | GAPDH | GAPDH | value |
| Probe set | SEQ ID | Marker | Ave. Healthy | SD | Other | Other | Grp1 | Grp1 | Healthy | Other | Grp1 | Grp1 vs. |
| Identifier | NO: | Gene | Control | Control | CIS | CIS | CIS | CIS | Controls | CIS | CIS | Other CIS |
| AFFX- | 1022 | GAPDH | 5721.51139 | 1112.780879 | 3213.7 | 1181.0 | 3004.4 | 822.7 | 1000 | 1000 | 1000 | 5.90E−01 |
| HUMGAPDH/ | | | | | | | | | | | | |
| M33197_3_at | | | | | | | | | | | | |

TABLE 2

| | SEQ | | | | Ave. | SD | Ave. |
|---|---|---|---|---|---|---|---|
| Probe set | ID | Marker | Ave. Healthy | SD | Other | Other | Grp1 |
| Identifier | NO: | Gene | Control | Control | CIS | CIS | CIS |
| 1555981_at | 977 | C17orf65 | 38.95432822 | 15.34203 | 36.2 | 19.1 | 88.4 |
| 201151_s_at | 983 | MBNL1 | 49.3888033 | 17.65848 | 159.4 | 115.2 | 69.2 |
| 201369_s_at | 985 | ZFP36L2 | 324.3180809 | 179.1896 | 386.8 | 316.2 | 1259.6 |
| 204355_at | 989 | DHX30 | 165.7049361 | 74.02059 | 87.0 | 78.1 | 155.2 |
| 204443_at | 311 | ARSA | 149.3298935 | 53.38473 | 83.5 | 52.9 | 181.8 |
| 207238_s_at | 287 | PTPRC | 240.7214311 | 229.6297 | 325.1 | 120.8 | 449.7 |
| 207460_at | 617 | GZMM | 273.0278916 | 93.21375 | 119.0 | 60.6 | 172.0 |
| 207688_s_at | 993 | INHBC | 47.70860316 | 13.49079 | 184.9 | 131.1 | 42.4 |
| 208700_s_at | 994 | TKT | 773.596628 | 190.5899 | 318.6 | 131.4 | 426.8 |
| 208751_at | 995 | NAPA | 57.24012334 | 22.75417 | 36.0 | 18.9 | 97.3 |
| 208764_s_at | 996 | ATP5G2 | 1064.023434 | 298.7852 | 1031.5 | 549.3 | 2754.1 |
| 209398_at | 941 | HIST1H1C | 202.0854177 | 77.05926 | 65.4 | 31.1 | 69.6 |
| 212044_s_at | 1002 | RPL27A | 315.1552812 | 74.41744 | 796.7 | 569.0 | 236.5 |
| 213183_s_at | 320 | CDKN1C | 53.81104837 | 23.77523 | 48.2 | 31.9 | 20.0 |
| 214123_s_at | 1005 | C4orf10 | 50.3753172 | 19.53119 | 129.7 | 117.6 | 31.0 |
| 214395_x_at | 1006 | EEF1D | 96.3768725 | 25.79618 | 348.5 | 288.0 | 68.6 |
| 216520_s_at | 138 | TPT1 | 3074.723831 | 3156.269 | 5236.5 | 2877.9 | 10048.5 |
| 217257_at | 1009 | unknown | 23.65021404 | 4.594125 | 97.2 | 66.4 | 23.3 |
| 221943_x_at | 1012 | RPL38 | 408.5680429 | 139.3603 | 1035.3 | 747.2 | 273.9 |
| 221960_s_at | 1013 | RAB2 | 71.96527979 | 21.04722 | 130.3 | 77.2 | 48.8 |
| 222487_s_at | 17 | RPS27L | 63.3711197 | 18.47674 | 254.3 | 142.8 | 95.4 |
| 225247_at | 298 | C19orf6 | 912.8038675 | 351.313 | 569.7 | 511.6 | 1129.8 |
| 227259_at | 1015 | CD47 | 350.7451938 | 200.3456 | 341.6 | 202.8 | 236.2 |
| 228673_s_at | 1016 | EML4 | 117.0116781 | 48.07124 | 225.5 | 167.8 | 62.1 |
| 229543_at | 1018 | RPL29 | 137.5338645 | 66.27801 | 394.7 | 419.9 | 111.9 |
| 238761_at | 245 | unknown | 75.96646062 | 49.14559 | 169.6 | 98.7 | 98.1 |
| 239487_at | 1020 | FAM98A | 59.11653508 | 32.00945 | 101.1 | 35.9 | 57.2 |
| 241617_x_at | 1021 | unknown | 72.37997255 | 13.27325 | 149.0 | 127.2 | 43.2 |

| | | Gene/ | Gene/ | Gene/ | T-test |
|---|---|---|---|---|---|
| | SD | GAPDH | GAPDH | GAPDH | P-value |
| Probe set | Grp1 | Healthy | Other | Grp1 | Grp1 vs. |
| Identifier | CIS | Controls | CIS | CIS | Other CIS |
| 1555981_at | 22.5 | 6.81 | 11.27 | 29.43 | 4.10E−08 |
| 201151_s_at | 24.4 | 8.63 | 49.61 | 23.02 | 1.20E−02 |
| 201369_s_at | 459.4 | 56.68 | 120.35 | 419.26 | 2.27E−07 |
| 204355_at | 38.8 | 28.96 | 27.08 | 51.67 | 8.09E−03 |
| 204443_at | 53.6 | 26.10 | 26.00 | 60.52 | 1.28E−05 |
| 207238_s_at | 141.0 | 42.07 | 101.17 | 149.68 | 1.07E−02 |
| 207460_at | 56.1 | 47.72 | 37.02 | 57.25 | 1.78E−02 |
| 207688_s_at | 16.0 | 8.34 | 57.53 | 14.11 | 7.56E−04 |
| 208700_s_at | 123.4 | 135.21 | 99.15 | 142.06 | 2.55E−02 |
| 208751_at | 29.2 | 10.00 | 11.19 | 32.37 | 1.82E−08 |
| 208764_s_at | 430.4 | 185.97 | 320.98 | 916.66 | 1.05E−10 |
| 209398_at | 44.5 | 35.32 | 20.35 | 23.17 | 7.48E−01 |
| 212044_s_at | 58.7 | 55.08 | 247.92 | 78.73 | 1.94E−03 |
| 213183_s_at | 4.6 | 9.41 | 15.01 | 6.65 | 4.84E−03 |
| 214123_s_at | 7.4 | 8.80 | 40.36 | 10.31 | 6.97E−03 |
| 214395_x_at | 22.4 | 16.84 | 108.44 | 22.82 | 2.15E−03 |
| 216520_s_at | 1252.3 | 537.40 | 1629.44 | 3344.55 | 4.83E−06 |
| 217257_at | 6.9 | 4.13 | 30.25 | 7.77 | 5.84E−04 |
| 221943_x_at | 89.3 | 71.41 | 322.14 | 91.17 | 1.42E−03 |
| 221960_s_at | 13.7 | 12.58 | 40.53 | 16.24 | 1.05E−03 |
| 222487_s_at | 45.2 | 11.08 | 79.12 | 31.76 | 7.44E−04 |
| 225247_at | 320.9 | 159.54 | 177.28 | 376.04 | 1.69E−03 |
| 227259_at | 163.9 | 61.30 | 106.28 | 78.61 | 1.33E−01 |
| 228673_s_at | 18.7 | 20.45 | 70.18 | 20.66 | 2.14E−03 |
| 229543_at | 81.7 | 24.04 | 122.81 | 37.26 | 2.86E−02 |
| 238761_at | 20.3 | 13.28 | 52.78 | 32.64 | 1.92E−02 |
| 239487_at | 33.4 | 10.33 | 31.47 | 19.05 | 1.43E−03 |
| 241617_x_at | 12.3 | 12.65 | 46.37 | 14.39 | 7.50E−03 |

TABLE 4

| | SEQ | | | | | | |
|---|---|---|---|---|---|---|---|
| Probe set | ID | | | Ave. | Ave. | | |
| Identifier | NO: | Marker Gene | Gene Description | Ctrl | CIS | Ratio | P-value |
| 237383_at | 1 | | Transcribed locus | 30.5 | 143.8 | 4.72 | <1.0E−07 |
| 217800_s_at | 2 | NDFIP1 | Nedd4 family interacting protein 1 | 102.3 | 454.6 | 4.44 | <1.0E−07 |
| 231193_s_at | 3 | | CDNA clone IMAGE: 4285619 | 18.5 | 69.4 | 3.74 | 1.0E−07 |
| 226458_at | 4 | | clone IMAGE: 4449283 | 61.0 | 221.0 | 3.62 | 1.0E−07 |
| 202342_s_at | 5 | TRIM2 | tripartite motif-containing 2 | 17.6 | 62.5 | 3.56 | <1.0E−07 |
| 226035_at | 6 | USP31 | ubiquitin specific peptidase 31 | 29.0 | 98.9 | 3.41 | <1.0E−07 |
| 233085_s_at | 7 | FLJ22833 | hypothetical protein FLJ22833 | 113.0 | 380.5 | 3.37 | <1.0E−07 |
| 230085_at | 8 | | Transcribed locus | 115.1 | 383.1 | 3.33 | 7.4E−06 |
| 238355_at | 9 | RNPC2 | RNA-binding region (RNP1, RRM) containing 2 | 10.6 | 34.5 | 3.26 | 4.0E−07 |
| 209662_at | 10 | CETN3 | centrin, EF-hand protein, 3 (CDC31 homolog, yeast) | 104.9 | 341.8 | 3.26 | <1.0E−07 |
| 1564164_at | 11 | FLJ20054 | hypothetical protein FLJ20054 | 68.1 | 221.5 | 3.25 | <1.0E−07 |
| 202600_s_at | 12 | NRIP1 | nuclear receptor interacting protein 1 | 64.4 | 209.3 | 3.25 | <1.0E−07 |
| 224851_at | 13 | CDK6 | cyclin-dependent kinase 6 | 134.8 | 427.8 | 3.17 | <1.0E−07 |
| 230860_at | 14 | | Transcribed locus | 36.5 | 115.6 | 3.17 | <1.0E−07 |
| 1556064_at | 15 | LOC284926 | Hypothetical protein LOC284926 | 11.6 | 36.8 | 3.16 | <1.0E−07 |
| 1557238_s_at | 16 | FLJ10707 | Hypothetical protein FLJ10707 | 11.8 | 37.3 | 3.15 | <1.0E−07 |
| 222487_s_at | 17 | RPS27L | ribosomal protein S27-like | 64.8 | 203.5 | 3.14 | <1.0E−07 |
| 1559500_at | 18 | KIAA0804 | KIAA0804 | 21.7 | 67.2 | 3.10 | <1.0E−07 |
| 213530_at | 19 | RAB3GAP1 | RAB3 GTPase activating protein subunit 1 (catalytic) | 59.6 | 182.7 | 3.07 | <1.0E−07 |
| 225537_at | 20 | TRAPPC6B | trafficking protein particle complex 6B | 66.7 | 202.7 | 3.04 | <1.0E−07 |
| 222872_x_at | 21 | FLJ22833 | hypothetical protein FLJ22833 | 205.9 | 621.0 | 3.02 | <1.0E−07 |
| 203129_s_at | 22 | KIF5C | kinesin family member 5C | 136.3 | 407.0 | 2.99 | <1.0E−07 |
| 215898_at | 23 | TTLL5 | tubulin tyrosine ligase-like family, member 5 | 26.8 | 80.1 | 2.99 | <1.0E−07 |
| 239205_s_at | 24 | CR1 /// CR1L | complement component (3b/4b) receptor 1 | 24.0 | 71.0 | 2.96 | 5.0E−07 |
| 240168_at | 25 | XPO7 | exportin 7 | 119.5 | 350.1 | 2.93 | <1.0E−07 |
| 230323_s_at | 26 | TMEM45B | transmembrane protein 45B | 48.6 | 137.9 | 2.84 | <1.0E−07 |
| 1558250_s_at | 27 | | DKFZp686E16168 | 113.8 | 320.2 | 2.81 | <1.0E−07 |
| 242557_at | 28 | | Transcribed locus | 97.5 | 272.0 | 2.79 | 1.0E−07 |
| 223698_at | 29 | SLC25A36 | solute carrier family 25, member 36 | 25.4 | 70.7 | 2.78 | <1.0E−07 |
| 226977_at | 30 | LOC492311 | similar to bovine IgA regulatory protein | 268.8 | 746.6 | 2.78 | <1.0E−07 |
| 1552343_s_at | 31 | PDE7A | phosphodiesterase 7A | 95.0 | 258.6 | 2.72 | <1.0E−07 |
| 218820_at | 32 | C14orf132 | chromosome 14 open reading frame 132 | 107.1 | 290.7 | 2.71 | <1.0E−07 |
| 244517_x_at | 33 | RNF146 | Ring finger protein 146 | 63.4 | 170.2 | 2.68 | <1.0E−07 |
| 229204_at | 34 | HP1-BP74 | Heterochromatin protein 1, binding protein 3 | 93.2 | 249.2 | 2.67 | 7.0E−07 |
| 236165_at | 35 | MSL3L1 | male-specific lethal 3-like 1 (Drosophila) | 102.6 | 274.2 | 2.67 | <1.0E−07 |
| 236450_at | 36 | TARSL2 | Threonyl-tRNA synthetase-like 2 | 18.9 | 50.6 | 2.67 | <1.0E−07 |
| 210077_s_at | 37 | SFRS5 | splicing factor, arginine/serine-rich 5 | 42.3 | 112.3 | 2.66 | <1.0E−07 |
| 243981_at | 38 | STK4 | serine/threonine kinase 4 | 174.9 | 461.5 | 2.64 | <1.0E−07 |
| 225414_at | 39 | RNF149 | ring finger protein 149 | 243.1 | 638.9 | 2.63 | <1.0E−07 |
| 241838_at | 40 | | Transcribed locus | 20.6 | 54.0 | 2.63 | <1.0E−07 |
| 224558_s_at | 41 | MALAT1 | metastasis associated lung adenocarcinoma transcript 1 | 1851.8 | 4857.9 | 2.62 | <1.0E−07 |
| 217536_x_at | 42 | | weakly similar to NP_055301.1 neuronal thread protein | 44.2 | 116.0 | 2.62 | <1.0E−07 |
| | | | AD7c-NTP | | | | |
| 1558233_s_at | 43 | ATF1 | Activating transcription factor 1 | 63.7 | 166.8 | 2.62 | <1.0E−07 |
| 239449_at | 44 | ANKH | Ankylosis, progressive homolog (mouse) | 53.1 | 139.0 | 2.62 | <1.0E−07 |
| 239441_at | 45 | | | 21.1 | 55.1 | 2.61 | 1.1E−05 |
| 204373_s_at | 46 | CAP350 | centrosome-associated protein 350 | 465.7 | 1210.3 | 2.60 | <1.0E−07 |
| 223243_s_at | 47 | C1orf22 | chromosome 1 open reading frame 22 | 156.1 | 402.5 | 2.58 | <1.0E−07 |
| 237387_at | 48 | | Transcribed locus | 21.9 | 56.4 | 2.57 | <1.0E−07 |
| 227871_at | 49 | CHM | choroideremia (Rab escort protein 1) | 318.8 | 819.9 | 2.57 | <1.0E−07 |
| 229007_at | 50 | LOC283788 | hypothetical protein LOC283788 | 29.5 | 75.6 | 2.56 | 7.5E−06 |
| 226041_at | 51 | NAPE-PLD | N-acyl-phosphatidylethanolamine-hydrolyzing | 65.5 | 167.1 | 2.55 | 1.0E−07 |
| | | | phospholipase D | | | | |
| 228734_at | 52 | UBE2V2 | Ubiquitin-conjugating enzyme E2 variant 2 | 19.3 | 49.2 | 2.54 | 1.5E−05 |
| 217655_at | 53 | FXYD5 | FXYD domain containing ion transport regulator 5 | 63.6 | 161.1 | 2.53 | 6.0E−07 |
| 212215_at | 54 | PREPL | prolyl endopeptidase-like | 190.8 | 483.2 | 2.53 | <1.0E−07 |
| 244521_at | 55 | C20orf17 | Chromosome 20 open reading frame 17 | 38.8 | 98.2 | 2.53 | <1.0E−07 |
| 218643_s_at | 56 | CRIPT | postsynaptic protein CRIPT | 56.5 | 142.9 | 2.53 | <1.0E−07 |
| 229366_at | 57 | CRBN | Cereblon | 115.0 | 290.5 | 2.53 | <1.0E−07 |
| 220459_at | 58 | MCM3APAS | MCM3 minichromosome maintenance deficient 3 (S. cerevisiae) | 22.9 | 57.7 | 2.52 | <1.0E−07 |
| | | | associated protein antisense | | | | |
| 219308_s_at | 59 | AK5 | adenylate kinase 5 | 90.9 | 228.8 | 2.52 | <1.0E−07 |
| 219467_at | 60 | FLJ20125 | hypothetical protein FLJ20125 | 102.7 | 258.6 | 2.52 | <1.0E−07 |
| 222714_s_at | 61 | LACTB2 | lactamase, beta 2 | 14.6 | 36.8 | 2.52 | <1.0E−07 |
| 230556_at | 62 | IMMP1L | IMP1 inner mitochondrial membrane peptidase-like (S. cerevisiae) | 37.6 | 94.2 | 2.51 | <1.0E−07 |
| 1554480_a_at | 63 | SVH | SVH protein | 105.5 | 263.4 | 2.50 | <1.0E−07 |
| 237464_at | 64 | IMAA | LAT1-3TM protein 2 | 77.1 | 192.2 | 2.49 | <1.0E−07 |
| 1561195_at | 65 | TM7SF1 | Transmembrane 7 superfamily member 1 (upregulated in | 10.9 | 27.0 | 2.48 | <1.0E−07 |
| | | | kidney) | | | | |
| 239888_at | 66 | | Transcribed locus | 12.7 | 31.4 | 2.48 | 1.0E−07 |
| 229070_at | 67 | C6orf105 | chromosome 6 open reading frame 105 | 229.8 | 570.7 | 2.48 | <1.0E−07 |
| 239577_at | 68 | | | 46.2 | 114.7 | 2.48 | <1.0E−07 |
| 213149_at | 69 | DLAT | dihydrolipoamide S-acetyltransferase (E2 component of | 25.8 | 64.1 | 2.48 | <1.0E−07 |
| | | | pyruvate dehydrogenase complex) | | | | |
| 224786_at | 70 | SCOC | short coiled-coil protein | 122.2 | 302.9 | 2.48 | <1.0E−07 |
| 1558215_s_at | 71 | UBTF | upstream binding transcription factor, RNA polymerase I | 28.3 | 70.3 | 2.48 | <1.0E−07 |
| 213268_at | 72 | CAMTA1 | calmodulin binding transcription activator 1 | 21.2 | 52.6 | 2.48 | 3.0E−07 |
| 218967_s_at | 73 | PTER | phosphotriesterase related | 54.3 | 134.4 | 2.47 | <1.0E−07 |
| 235427_at | 74 | | Transcribed locus | 150.8 | 372.3 | 2.47 | <1.0E−07 |
| 231956_at | 75 | KIAA1618 | KIAA1618 | 91.0 | 224.5 | 2.47 | <1.0E−07 |
| 235213_at | 76 | ITPKB | Inositol 1,4,5-trisphosphate 3-kinase B | 799.3 | 1965.6 | 2.46 | <1.0E−07 |
| 229287_at | 77 | | Full-length cDNA clone CS0DK010YA20 of HeLa cells Cot | 212.7 | 522.6 | 2.46 | <1.0E−07 |
| | | | 25-normalized of Homo sapiens | | | | |
| 200056_s_at | 78 | C1D | nuclear DNA-binding protein /// nuclear DNA-binding | 169.1 | 415.0 | 2.46 | <1.0E−07 |
| | | | protein | | | | |
| 206061_s_at | 79 | DICER1 | Dicer1, Dcr-1 homolog (Drosophila) | 114.9 | 281.7 | 2.45 | 3.0E−07 |
| 228446_at | 80 | KIAA2026 | KIAA2026 | 460.5 | 1118.7 | 2.43 | <1.0E−07 |
| 1557055_s_at | 81 | LOC284591 | hypothetical protein LOC284591 | 159.0 | 385.7 | 2.43 | 1.0E−07 |
| 232628_at | 82 | FAM13A1 | Family with sequence similarity 13, member A1 | 110.2 | 267.2 | 2.43 | 3.8E−06 |
| 1554021_a_at | 83 | ZNF12 | zinc finger protein 12 | 29.6 | 71.3 | 2.41 | <1.0E−07 |
| 240824_at | 84 | OBFC1 | Chromosome 21 open reading frame 53 | 68.9 | 165.6 | 2.40 | <1.0E−07 |
| 231866_at | 85 | LNPEP | leucyl/cystinyl aminopeptidase | 386.2 | 927.8 | 2.40 | <1.0E−07 |
| 215985_at | 86 | HCG8 | HLA complex group 8 | 64.7 | 155.3 | 2.40 | <1.0E−07 |
| 213317_at | 87 | CLIC5 | Chloride intracellular channel 5 | 42.1 | 100.9 | 2.39 | <1.0E−07 |
| 233713_at | 88 | SMYD2 | SET and MYND domain containing 2 | 36.5 | 87.3 | 2.39 | <1.0E−07 |
| 209840_s_at | 89 | LRRN3 | leucine rich repeat neuronal 3 | 368.5 | 879.7 | 2.39 | 2.9E−06 |
| 240513_at | 90 | | | 36.6 | 87.0 | 2.38 | <1.0E−07 |
| 1558732_at | 91 | | | 186.7 | 442.5 | 2.37 | <1.0E−07 |
| 206641_at | 92 | TNFRSF17 | tumor necrosis factor receptor superfamily, member 17 | 23.1 | 54.6 | 2.36 | 1.9E−03 |
| 1556543_at | 93 | ZCCHC7 | Zinc finger, CCHC domain containing 7 | 72.3 | 170.9 | 2.36 | <1.0E−07 |
| 223324_s_at | 94 | TRPM7 | transient receptor potential cation channel, subfamily M, | 63.1 | 148.3 | 2.35 | <1.0E−07 |
| | | | member 7 | | | | |
| 236000_s_at | 95 | HNRPD | Heterogeneous nuclear ribonucleoprotein D (AU-rich | 322.8 | 758.1 | 2.35 | <1.0E−07 |
| | | | element RNA binding protein 1, 37 kDa) | | | | |
| 217993_s_at | 96 | MAT2B | methionine adenosyltransferase II, beta | 820.4 | 1919.3 | 2.34 | <1.0E−07 |
| 225127_at | 97 | KIAA1423 | KIAA1423 | 179.8 | 420.4 | 2.34 | <1.0E−07 |
| 241741_at | 98 | C20orf155 | chromosome 20 open reading frame 155 | 52.1 | 121.7 | 2.34 | <1.0E−07 |
| 213353_at | 99 | ABCA5 | ATP-binding cassette, sub-family A (ABC1), member 5 | 176.2 | 411.5 | 2.33 | <1.0E−07 |
| 239726_at | 100 | | | 156.3 | 364.7 | 2.33 | <1.0E−07 |
| 225835_at | 101 | SLC12A2 | solute carrier family 12 (sodium/potassium/chloride | 49.5 | 115.2 | 2.33 | <1.0E−07 |
| | | | transporters), member 2 | | | | |
| 232535_at | 102 | | MRNA; cDNA DKFZp434L201 (from clone | 19.0 | 44.1 | 2.32 | 9.0E−07 |
| | | | DKFZp434L201) | | | | |
| 233898_s_at | 103 | FGFR1OP2 | FGFR1 oncogene partner 2 | 693.7 | 1606.0 | 2.32 | <1.0E−07 |
| 212840_at | 104 | KIAA0794 | KIAA0794 protein | 190.9 | 440.8 | 2.31 | <1.0E−07 |
| 238635_at | 105 | FLJ21657 | hypothetical protein FLJ21657 | 11.3 | 26.1 | 2.31 | 2.0E−07 |
| 219571_s_at | 106 | ZNF12 | zinc finger protein 12 | 25.0 | 57.4 | 2.30 | 1.0E−07 |
| 1554345_a_at | 107 | FLJ20125 | hypothetical protein FLJ20125 | 35.0 | 80.1 | 2.29 | 3.0E−07 |
| 238598_s_at | 108 | RNF32 | Ring finger protein 32 | 56.7 | 129.8 | 2.29 | <1.0E−07 |
| 205763_s_at | 109 | DDX18 | DEAD (Asp-Glu-Ala-Asp) box polypeptide 18 | 116.5 | 266.5 | 2.29 | <1.0E−07 |
| 242827_x_at | 110 | | Transcribed locus | 134.4 | 307.3 | 2.29 | <1.0E−07 |
| 225240_s_at | 111 | MSI2 | musashi homolog 2 (Drosophila) | 363.7 | 830.8 | 2.28 | <1.0E−07 |
| 218135_at | 112 | PTX1 | PTX1 protein | 77.3 | 176.3 | 2.28 | <1.0E−07 |
| 238174_at | 113 | FBXL17 | F-box and leucine-rich repeat protein 17 | 23.6 | 53.8 | 2.28 | 2.5E−05 |
| 232165_at | 114 | EPPK1 | epiplakin 1 | 142.9 | 325.6 | 2.28 | 1.0E−07 |
| 221830_at | 115 | RAP2A | RAP2A, member of RAS oncogene family | 225.4 | 510.5 | 2.27 | <1.0E−07 |
| 218607_s_at | 116 | SDAD1 | SDA1 domain containing 1 | 153.8 | 346.7 | 2.25 | <1.0E−07 |
| 228157_at | 117 | ZNF207 | zinc finger protein 207 | 469.4 | 1055.0 | 2.25 | <1.0E−07 |
| 232974_at | 118 | HDHD1A | Haloacid dehalogenase-like hydrolase domain containing 1A | 101.2 | 227.3 | 2.25 | <1.0E−07 |
| 202351_at | 119 | ITGAV | integrin, alpha V (vitronectin receptor, alpha polypeptide, | 196.1 | 440.2 | 2.24 | <1.0E−07 |
| | | | antigen CD51) | | | | |
| 228248_at | 120 | AVO3 | TORC2-specific protein AVO3 | 97.5 | 218.4 | 2.24 | 2.9E−05 |
| 226329_s_at | 121 | LOC129531 | hypothetical protein BC018453 | 126.8 | 284.0 | 2.24 | <1.0E−07 |
| 205097_at | 122 | SLC26A2 | solute carrier family 26 (sulfate transporter), member 2 | 63.1 | 140.9 | 2.23 | <1.0E−07 |
| 230192_at | 123 | RFP2 | ret finger protein 2 | 46.7 | 104.3 | 2.23 | 2.4E−06 |
| 236835_at | 124 | FUT8 | fucosyltransferase 8 (alpha (1,6) fucosyltransferase) | 21.8 | 48.6 | 2.23 | <1.0E−07 |
| 213331_s_at | 125 | NEK1 | NIMA (never in mitosis gene a)-related kinase 1 | 101.4 | 226.3 | 2.23 | <1.0E−07 |
| 237006_at | 126 | MLLT2 | AF4/FMR2 family, member 1 | 196.8 | 439.1 | 2.23 | <1.0E−07 |
| 202760_s_at | 127 | PALM2-AKAP2 | PALM2-AKAP2 protein | 124.1 | 276.5 | 2.23 | <1.0E−07 |
| 201737_s_at | 128 | MARCH6 | membrane-associated ring finger (C3HC4) 6 | 168.8 | 375.7 | 2.23 | <1.0E−07 |
| 235302_at | 129 | | Full-length cDNA clone CS0CAP006YP08 of Thymus of | 65.8 | 146.3 | 2.22 | <1.0E−07 |
| | | | Homo sapiens (human) | | | | |
| 1557733_a_at | 130 | | MRNA; cDNA DKFZp667K2218 (from clone | 648.3 | 1441.2 | 2.22 | <1.0E−07 |
| | | | DKFZp667K2218) | | | | |
| 217196_s_at | 131 | CAMSAP1L1 | calmodulin regulated spectrin-associated protein 1-like 1 | 65.1 | 144.7 | 2.22 | <1.0E−07 |
| 211761_s_at | 132 | CACYBP | calcyclin binding protein /// calcyclin binding protein | 478.0 | 1061.0 | 2.22 | <1.0E−07 |
| 244414_at | 133 | MAML2 | Mastermind-like 2 (Drosophila) | 419.7 | 931.4 | 2.22 | <1.0E−07 |
| 205292_s_at | 134 | HNRPA2B1 | heterogeneous nuclear ribonucleoprotein A2/B1 | 772.3 | 1711.6 | 2.22 | <1.0E−07 |
| 1565830_at | 135 | KIAA1731 | KIAA1731 | 19.6 | 43.5 | 2.21 | 4.8E−06 |
| 206314_at | 136 | ZNF167 | zinc finger protein 167 | 93.5 | 207.1 | 2.21 | <1.0E−07 |
| 238577_s_at | 137 | | Transcribed locus | 74.5 | 164.6 | 2.21 | <1.0E−07 |
| 216520_s_at | 138 | TPT1 | tumor protein, translationally-controlled 1 | 3119.4 | 6895.4 | 2.21 | 1.0E−07 |
| 223681_s_at | 139 | INADL | InaD-like (Drosophila) | 25.0 | 55.3 | 2.21 | <1.0E−07 |
| 235306_at | 140 | GIMAP8 | GTPase, IMAP family member 8 | 249.0 | 548.3 | 2.20 | 1.0E−07 |
| 228190_at | 141 | | | 41.9 | 92.3 | 2.20 | 1.1E−05 |
| 241891_at | 142 | DOCK8 | Dedicator of cytokinesis 8 | 84.8 | 185.8 | 2.19 | <1.0E−07 |
| 219004_s_at | 143 | C21orf45 | chromosome 21 open reading frame 45 | 301.5 | 660.2 | 2.19 | <1.0E−07 |
| 226587_at | 144 | SNRPN | Small nuclear ribonucleoprotein polypeptide N | 71.9 | 157.3 | 2.19 | <1.0E−07 |
| 218361_at | 145 | GOLPH3L | golgi phosphoprotein 3-like | 139.2 | 304.1 | 2.19 | 8.0E−07 |
| 240182_at | 146 | | Transcribed locus, strongly similar to XP_531023.1 | 50.7 | 110.9 | 2.19 | 5.0E−04 |
| 235728_at | 147 | ZFP3 | zinc finger protein 3 homolog (mouse) | 70.2 | 153.1 | 2.18 | 2.0E−07 |
| 222791_at | 148 | RSBN1 | round spermatid basic protein 1 | 112.3 | 244.8 | 2.18 | <1.0E−07 |
| 219979_s_at | 149 | HSPC138 | hypothetical protein HSPC138 | 46.0 | 100.3 | 2.18 | 4.4E−05 |
| 226503_at | 150 | RIF1 | RAP1 interacting factor homolog (yeast) | 98.1 | 213.0 | 2.17 | <1.0E−07 |
| 231896_s_at | 151 | DENR | density-regulated protein | 664.7 | 1442.1 | 2.17 | <1.0E−07 |
| 212368_at | 152 | ZNF292 | zinc finger protein 292 | 208.4 | 451.9 | 2.17 | <1.0E−07 |
| 1569607_s_at | 153 | ANKRD20A2 | ankyrin repeat domain 20 family, member A2 | 172.8 | 374.6 | 2.17 | 2.2E−06 |
| 236562_at | 154 | ZNF439 | zinc finger protein 439 | 26.2 | 56.7 | 2.17 | <1.0E−07 |
| 229075_at | 155 | | Transcribed locus | 54.7 | 118.5 | 2.16 | 6.7E−06 |
| 225100_at | 156 | FBXO45 | F-box protein 45 | 145.9 | 314.0 | 2.15 | <1.0E−07 |
| 243363_at | 157 | LEF1 | lymphoid enhancer-binding factor 1 | 135.1 | 290.3 | 2.15 | <1.0E−07 |
| 203870_at | 158 | USP46 | ubiquitin specific peptidase 46 | 111.4 | 239.0 | 2.15 | 2.7E−05 |
| 229333_at | 159 | | Transcribed locus, weakly similar to XP_512541.1 | 79.0 | 169.3 | 2.14 | 2.5E−06 |
| 229531_at | 160 | | Mitochondrial carrier triple repeat 6 | 62.1 | 133.1 | 2.14 | <1.0E−07 |
| 220235_s_at | 161 | C1orf103 | chromosome 1 open reading frame 103 | 76.0 | 162.8 | 2.14 | 1.0E−07 |
| 232333_at | 162 | MAML2 | Mastermind-like 2 (Drosophila) | 116.9 | 249.9 | 2.14 | <1.0E−07 |
| 228729_at | 163 | CCNB1 | cyclin B1 | 15.6 | 33.3 | 2.14 | 1.9E−05 |
| 212926_at | 164 | SMC5L1 | SMC5 structural maintenance of chromosomes 5-like 1 | 87.2 | 186.3 | 2.14 | <1.0E−07 |
| | | | (yeast) | | | | |
| 213687_s_at | 165 | RPL35A | ribosomal protein L35a | 4596.7 | 9812.4 | 2.13 | <1.0E−07 |
| 201143_s_at | 166 | EIF2S1 | eukaryotic translation initiation factor 2, subunit 1 alpha, | 239.8 | 511.5 | 2.13 | 1.0E−07 |
| | | | 35 kDa | | | | |
| 238653_at | 167 | LRIG2 | Leucine-rich repeats and immunoglobulin-like domains 2 | 153.0 | 326.0 | 2.13 | <1.0E−07 |
| 223264_at | 168 | MESDC1 | mesoderm development candidate 1 | 395.9 | 843.2 | 2.13 | <1.0E−07 |
| 230494_at | 169 | | | 206.3 | 438.5 | 2.13 | <1.0E−07 |
| 227751_at | 170 | PDCD5 | Programmed cell death 5 | 36.7 | 77.9 | 2.12 | <1.0E−07 |
| 1569827_at | 171 | APG7L | ATG7 autophagy related 7 homolog (S. cerevisiae) | 38.1 | 80.8 | 2.12 | <1.0E−07 |
| 1560926_at | 172 | PPP4R2 | Protein phosphatase 4, regulatory subunit 2 | 63.8 | 135.0 | 2.12 | 2.3E−04 |
| 244663_at | 173 | | Transcribed locus | 48.5 | 102.7 | 2.12 | 3.0E−07 |
| 205449_at | 174 | SAC3D1 | SAC3 domain containing 1 | 109.7 | 232.0 | 2.12 | 5.5E−05 |
| 211276_at | 175 | TCEAL2 | transcription elongation factor A (SII)-like 2 | 48.2 | 101.9 | 2.11 | 8.0E−06 |
| 238944_at | 176 | | Transcribed locus, moderately similar to XP_512724.1 | 181.3 | 381.7 | 2.11 | 2.0E−07 |
| 238468_at | 177 | TNRC6B | trinucleotide repeat containing 6B | 289.3 | 608.0 | 2.10 | 1.0E−07 |
| 203983_at | 178 | TSNAX | translin-associated factor X | 279.6 | 584.8 | 2.09 | <1.0E−07 |
| 218943_s_at | 179 | DDX58 | DEAD (Asp-Glu-Ala-Asp) box polypeptide 58 | 108.3 | 225.9 | 2.09 | 1.0E−07 |
| 209841_s_at | 180 | LRRN3 | leucine rich repeat neuronal 3 | 126.4 | 263.8 | 2.09 | 1.5E−04 |
| 225178_at | 181 | TTC14 | tetratricopeptide repeat domain 14 | 110.9 | 230.7 | 2.08 | <1.0E−07 |
| 207983_s_at | 182 | STAG2 | stromal antigen 2 | 145.6 | 302.2 | 2.08 | <1.0E−07 |
| 201027_s_at | 183 | EIF5B | eukaryotic translation initiation factor 5B | 109.8 | 227.7 | 2.07 | <1.0E−07 |
| 226643_s_at | 184 | LOC134492 | NudC domain containing 2 | 35.5 | 73.4 | 2.07 | 1.0E−07 |
| 227636_at | 185 | THAP5 | THAP domain containing 5 | 118.6 | 244.4 | 2.06 | <1.0E−07 |
| 200988_s_at | 186 | PSME3 | proteasome (prosome, macropain) activator subunit 3 (PA28 | 76.2 | 156.5 | 2.05 | 3.0E−07 |
| | | | gamma; Ki) | | | | |
| 228974_at | 187 | MGC48625 | Zinc finger protein 677 | 282.4 | 578.0 | 2.05 | 1.3E−06 |
| 228694_at | 188 | | Homo sapiens, clone IMAGE: 3352913, mRNA | 79.7 | 163.0 | 2.05 | <1.0E−07 |
| 235310_at | 189 | GCET2 | germinal center expressed transcript 2 | 127.2 | 260.3 | 2.05 | 2.3E−06 |
| 226107_at | 190 | C1GALT1 | Core 1 synthase, glycoprotein-N-acetylgalactosamine 3-beta- | 175.1 | 356.1 | 2.03 | 3.0E−07 |
| | | | galactosyltransferase, 1 | | | | |
| 224827_at | 191 | DC-UbP | Dendritic cell-derived ubiquitin-like protein | 44.5 | 90.5 | 2.03 | 7.0E−07 |
| 236321_at | 192 | LOC285550 | hypothetical protein LOC285550 | 53.9 | 109.4 | 2.03 | 3.3E−06 |
| 210073_at | 193 | ST8SIA1 | ST8 alpha-N-acetyl-neuraminide alpha-2,8-sialyltransferase 1 | 61.6 | 125.1 | 2.03 | 3.0E−06 |
| 201503_at | 194 | G3BP | Ras-GTPase-activating protein SH3-domain-binding protein | 135.7 | 273.5 | 2.02 | 4.0E−07 |
| 236583_at | 195 | | Transcribed locus | 1130.7 | 2278.6 | 2.02 | 4.0E−07 |
| 222691_at | 196 | SLC35B3 | solute carrier family 35, member B3 | 164.9 | 332.3 | 2.01 | 3.7E−06 |
| 229797_at | 197 | MCOLN3 | mucolipin 3 | 92.8 | 187.0 | 2.01 | 5.0E−05 |
| 236046_at | 198 | FLJ44896 | FLJ44896 protein | 24.4 | 48.9 | 2.01 | 1.8E−03 |
| 235424_at | 199 | C9orf42 | Chromosome 9 open reading frame 42 | 113.5 | 227.4 | 2.00 | 3.0E−07 |
| 227665_at | 200 | MCART1 | Mitochondrial carrier triple repeat 1 | 126.4 | 252.5 | 2.00 | <1.0E−07 |
| 34031_i_at | 201 | KRIT1 | KRIT1, ankyrin repeat containing | 90.4 | 180.6 | 2.00 | 9.3E−04 |
| 208864_s_at | 202 | TXN | thioredoxin | 301.9 | 602.4 | 2.00 | 1.0E−07 |
| 203404_at | 203 | ARMCX2 | armadillo repeat containing, X-linked 2 | 36.3 | 72.5 | 2.00 | 4.6E−04 |
| 201660_at | 204 | ACSL3 | Acyl-CoA synthetase long-chain family member 3 | 156.2 | 311.4 | 1.99 | <1.0E−07 |
| 203275_at | 205 | IRF2 | interferon regulatory factor 2 | 160.0 | 318.6 | 1.99 | 1.4E−05 |
| 230036_at | 206 | SAMD9L | sterile alpha motif domain containing 9-like | 372.7 | 741.5 | 1.99 | 3.0E−07 |
| 212771_at | 207 | C10orf38 | chromosome 10 open reading frame 38 | 132.6 | 263.8 | 1.99 | <1.0E−07 |
| 232614_at | 208 | BCL2 | B-cell CLL/lymphoma 2 | 307.7 | 608.3 | 1.98 | <1.0E−07 |
| 238923_at | 209 | SPOP | speckle-type POZ protein | 28.7 | 56.7 | 1.97 | 2.4E−06 |
| 239655_at | 210 | PRDM2 | PR domain containing 2, with ZNF domain | 54.8 | 108.0 | 1.97 | <1.0E−07 |
| 235177_at | 211 | LOC151194 | similar to hepatocellular carcinoma-associated antigen | 55.9 | 109.8 | 1.97 | 6.8E−06 |
| | | | HCA557b | | | | |
| 201964_at | 212 | ALS4 | amyotrophic lateral sclerosis 4 | 474.4 | 931.8 | 1.96 | 5.4E−06 |
| 201831_s_at | 213 | VDP | vesicle docking protein p115 | 83.2 | 163.5 | 1.96 | 9.9E−06 |
| 208635_x_at | 214 | NACA | nascent-polypeptide-associated complex alpha polypeptide | 4172.6 | 8189.6 | 1.96 | <1.0E−07 |
| 238554_at | 215 | LOC283852 | hypothetical protein LOC283852 | 56.1 | 109.7 | 1.96 | <1.0E−07 |
| 205078_at | 216 | PIGF | phosphatidylinositol glycan, class F | 39.9 | 78.0 | 1.95 | 2.0E−07 |
| 200033_at | 217 | DDX5 | DEAD (Asp-Glu-Ala-Asp) box polypeptide 5 | 3291.1 | 6424.5 | 1.95 | 1.0E−07 |
| 222679_s_at | 218 | DCUN1D1 | DCN1, defective in cullin neddylation 1, domain containing 1 | 28.8 | 56.2 | 1.95 | <1.0E−07 |
| 227492_at | 219 | | Transcribed locus, moderately similar to NP_689672.2 | 110.3 | 214.3 | 1.94 | 6.5E−04 |
| 200735_x_at | 220 | NACA | nascent-polypeptide-associated complex alpha polypeptide | 4369.0 | 8482.3 | 1.94 | <1.0E−07 |
| 212762_s_at | 221 | TCF7L2 | transcription factor 7-like 2 (T-cell specific, HMG-box) | 61.3 | 118.8 | 1.94 | 2.2E−04 |
| 235940_at | 222 | C9orf64 | chromosome 9 open reading frame 64 | 79.8 | 154.2 | 1.93 | 1.2E−03 |
| 224953_at | 223 | YIPF5 | Yip1 domain family, member 5 | 53.7 | 103.6 | 1.93 | 2.3E−06 |
| 225060_at | 224 | LRP11 | low density lipoprotein receptor-related protein 11 | 61.9 | 119.3 | 1.93 | 5.1E−06 |
| 221895_at | 225 | MOSPD2 | motile sperm domain containing 2 | 134.9 | 260.0 | 1.93 | 2.4E−06 |
| 236328_at | 226 | ZNF285 | zinc finger protein 285 | 60.6 | 116.3 | 1.92 | 3.3E−05 |
| 205668_at | 227 | LY75 | lymphocyte antigen 75 | 229.1 | 439.0 | 1.92 | 2.0E−05 |
| 224797_at | 228 | ARRDC3 | arrestin domain containing 3 | 319.9 | 612.9 | 1.92 | <1.0E−07 |
| 230168_at | 229 | | Transcribed locus | 198.1 | 379.3 | 1.91 | 2.9E−06 |
| 222457_s_at | 230 | EPLIN | epithelial protein lost in neoplasm beta | 41.3 | 78.9 | 1.91 | 3.6E−05 |
| 201455_s_at | 231 | NPEPPS | aminopeptidase puromycin sensitive | 131.3 | 250.7 | 1.91 | 2.7E−05 |
| 208860_s_at | 232 | ATRX | alpha thalassemia/mental retardation syndrome X-linked | 275.7 | 524.8 | 1.90 | 1.4E−02 |
| | | | (RAD54 homolog) | | | | |
| 226423_at | 233 | PAQR8 | progestin and adipoQ receptor family member VIII | 264.0 | 502.3 | 1.90 | 3.2E−06 |
| 240721_at | 234 | KIAA1967 | KIAA1967 | 32.8 | 62.2 | 1.90 | 1.1E−04 |
| 203608_at | 235 | ALDH5A1 | aldehyde dehydrogenase 5 family, member A1 | 67.4 | 127.9 | 1.90 | 1.1E−06 |
| 221916_at | 236 | NEFL | Neurofilament, light polypeptide 68 kDa | 104.2 | 196.8 | 1.89 | 7.4E−05 |
| 213246_at | 237 | C14orf109 | chromosome 14 open reading frame 109 | 168.1 | 317.4 | 1.89 | 8.1E−05 |
| 204759_at | 238 | RCBTB2 | regulator of chromosome condensation (RCC1) and BTB | 547.2 | 1033.0 | 1.89 | 2.0E−07 |
| | | | (POZ) domain containing protein 2 | | | | |
| 218984_at | 239 | FLJ20485 | hypothetical protein FLJ20485 | 250.3 | 472.2 | 1.89 | 1.2E−06 |
| 229285_at | 240 | RNASEL | ribonuclease L (2′,5′-oligoisoadenylate synthetase- | 139.9 | 263.5 | 1.88 | 1.3E−05 |
| | | | dependent) | | | | |
| 202303_x_at | 241 | SMARCA5 | SWI/SNF related, matrix associated, actin dependent | 81.2 | 153.0 | 1.88 | 7.3E−05 |
| | | | regulator of chromatin, subfamily a, member 5 | | | | |
| 216231_s_at | 242 | B2M | beta-2-microglobulin | 2873.8 | 5397.4 | 1.88 | 2.0E−05 |
| 231964_at | 243 | | MRNA; cDNA DKFZp564H1663 (from clone | 33.3 | 62.4 | 1.87 | 9.6E−05 |
| | | | DKFZp564H1663) | | | | |
| 1552790_a_at | 244 | TLOC1 | translocation protein 1 | 155.3 | 289.1 | 1.86 | 6.2E−06 |
| 238761_at | 245 | MED28 | Mediator of RNA polymerase II transcription, subunit 28 | 76.4 | 141.2 | 1.85 | 3.3E−06 |
| | | | homolog (yeast) | | | | |
| 215388_s_at | 246 | CFH /// CFHL1 | complement factor H /// complement factor H-related 1 | 45.4 | 83.8 | 1.84 | 1.1E−05 |
| 242363_at | 247 | DNCI2 | Dynein, cytoplasmic, intermediate polypeptide 2 | 116.9 | 215.6 | 1.84 | 8.5E−06 |
| 201928_at | 248 | PKP4 | plakophilin 4 | 87.7 | 161.6 | 1.84 | 1.1E−05 |
| 241497_at | 249 | | | 152.3 | 280.3 | 1.84 | 1.9E−02 |
| 1553508_at | 250 | MDS2 | myelodysplastic syndrome 2 translocation associated | 223.0 | 410.3 | 1.84 | 2.5E−04 |
| 205480_s_at | 251 | UGP2 | UDP-glucose pyrophosphorylase 2 | 568.7 | 1045.9 | 1.84 | 1.0E−06 |
| 218197_s_at | 252 | OXR1 | oxidation resistance 1 | 103.2 | 189.4 | 1.84 | <1.0E−07 |
| 242245_at | 253 | FLJ13815 | Synapse defective 1, Rho GTPase, homolog 2 (C. elegans) | 80.3 | 147.2 | 1.83 | 7.4E−06 |
| 244035_at | 254 | BCL2 | B-cell CLL/lymphoma 2 | 227.5 | 416.8 | 1.83 | 4.5E−05 |
| 212407_at | 255 | KIAA0859 | KIAA0859 | 53.4 | 97.6 | 1.83 | 1.2E−05 |
| 225290_at | 256 | | MRNA; cDNA DKFZp566C034 (from clone | 123.6 | 226.1 | 1.83 | 2.8E−06 |
| | | | DKFZp566C034) | | | | |
| 227266_s_at | 257 | FYB | FYN binding protein (FYB-120/130) | 762.5 | 1393.5 | 1.83 | 1.7E−06 |
| 214059_at | 258 | IFI44 | Interferon-induced protein 44 | 102.1 | 185.0 | 1.81 | 3.3E−04 |
| 224802_at | 259 | NDFIP2 | Nedd4 family interacting protein 2 | 66.5 | 119.9 | 1.80 | 4.9E−05 |
| 213388_at | 260 | PDE4DIP | phosphodiesterase 4D interacting protein (myomegalin) | 97.0 | 173.9 | 1.79 | 5.2E−06 |
| 243764_at | 261 | VSIG1 | V-set and immunoglobulin domain containing 1 | 128.3 | 230.0 | 1.79 | 8.4E−04 |
| 225348_at | 262 | | | 75.7 | 135.6 | 1.79 | 3.1E−05 |
| 202546_at | 263 | VAMP8 | vesicle-associated membrane protein 8 (endobrevin) | 857.9 | 1535.9 | 1.79 | 3.0E−05 |
| 230261_at | 264 | ST8SIA4 | ST8 alpha-N-acetyl-neuraminide alpha-2,8-sialyltransferase 4 | 46.0 | 82.0 | 1.78 | 5.8E−06 |
| 225669_at | 265 | IFNAR1 | interferon (alpha, beta and omega) receptor 1 | 137.2 | 243.1 | 1.77 | 1.2E−05 |
| 223377_x_at | 266 | CISH | cytokine inducible SH2-containing protein | 215.3 | 381.1 | 1.77 | 2.5E−04 |
| 203465_at | 267 | MRPL19 | mitochondrial ribosomal protein L19 | 46.6 | 82.3 | 1.77 | 1.6E−06 |
| 229090_at | 268 | LOC220930 | hypothetical protein LOC220930 | 38.1 | 66.6 | 1.75 | 1.4E−05 |
| 244042_x_at | 269 | | Transcribed locus | 22.2 | 38.6 | 1.74 | 1.5E−03 |
| 235551_at | 270 | WDR4 | WD repeat domain 4 | 35.8 | 62.3 | 1.74 | 2.4E−03 |
| 232584_at | 271 | C20orf17 | Chromosome 20 open reading frame 17 | 92.8 | 159.8 | 1.72 | 2.8E−05 |
| 221805_at | 272 | NEFL | neurofilament, light polypeptide 68 kDa | 15.7 | 26.8 | 1.71 | 1.2E−04 |
| 1559025_at | 273 | SEPT9 | septin 9 | 35.1 | 59.1 | 1.69 | 4.8E−04 |
| 213808_at | 274 | ADAM23 | ADAM metallopeptidase domain 23 | 46.7 | 78.7 | 1.68 | 8.7E−05 |
| 212063_at | 275 | CD44 | CD44 antigen (homing function and Indian blood group | 998.6 | 1680.2 | 1.68 | 5.0E−07 |
| | | | system) | | | | |
| 235422_at | 276 | | LOC440461 | 158.5 | 264.1 | 1.67 | 3.9E−03 |
| 208778_s_at | 277 | TCP1 | t-complex 1 | 1060.4 | 1760.8 | 1.66 | 6.0E−05 |
| 229850_at | 278 | FVT1 | Follicular lymphoma variant translocation 1 | 32.5 | 53.0 | 1.63 | 1.1E−03 |
| 205898_at | 279 | CX3CR1 | chemokine (C—X3—C motif) receptor 1 | 1377.8 | 2218.7 | 1.61 | 5.0E−03 |
| 1558569_at | 280 | MAML2 | Mastermind-like 2 (Drosophila) | 406.9 | 651.7 | 1.60 | 7.1E−03 |
| 214683_s_at | 281 | CLK1 | CDC-like kinase 1 | 510.2 | 805.3 | 1.58 | 1.0E−05 |
| 221223_x_at | 282 | CISH | cytokine inducible SH2-containing protein | 235.2 | 369.2 | 1.57 | 6.1E−04 |
| 239944_at | 283 | | CDNA FLJ42561 fis, clone BRACE3006463 | 102.3 | 160.4 | 1.57 | 4.8E−04 |
| 226671_at | 284 | | CDNA clone IMAGE: 4797120 | 75.0 | 117.6 | 1.57 | 6.9E−05 |
| 211985_s_at | 285 | CALM1 | calmodulin 1 (phosphorylase kinase, delta) | 720.8 | 1118.7 | 1.55 | 5.0E−03 |
| 209993_at | 286 | ABCB1 | ATP-binding cassette, sub-family B (MDR/TAP), member 1 | 53.2 | 82.4 | 1.55 | 1.3E−03 |
| 207238_s_at | 287 | PTPRC | protein tyrosine phosphatase, receptor type, C | 245.1 | 362.9 | 1.48 | 3.0E−05 |
| 214741_at | 288 | ZNF131 | zinc finger protein 131 (clone pHZ-10) | 136.6 | 195.6 | 1.43 | 8.2E−03 |
| 204042_at | 289 | WASF3 | WAS protein family, member 3 | 138.3 | 146.8 | 1.06 | 2.5E−02 |
| 202652_at | 290 | APBB1 | amyloid beta (A4) precursor protein-binding, family B, | 207.2 | 186.8 | −1.11 | 2.9E−02 |
| | | | member 1 (Fe65) | | | | |
| 201005_at | 291 | CD9 | CD9 antigen (p24) | 443.6 | 384.1 | −1.15 | 3.0E−03 |
| 212834_at | 292 | DDX52 | DEAD (Asp-Glu-Ala-Asp) box polypeptide 52 | 273.1 | 231.5 | −1.18 | 2.8E−02 |
| 220496_at | 293 | CLEC1B | C-type lectin domain family 1, member B | 343.0 | 290.4 | −1.18 | 1.2E−02 |
| 222891_s_at | 294 | BCL11A | B-cell CLL/lymphoma 11A (zinc finger protein) | 84.4 | 71.3 | −1.18 | 3.4E−02 |
| 235490_at | 295 | MGC10744 | hypothetical protein MGC10744 | 82.4 | 68.0 | −1.21 | 1.1E−02 |
| 215894_at | 296 | PTGDR | prostaglandin D2 receptor (DP) | 941.7 | 770.9 | −1.22 | 2.8E−02 |
| 240077_at | 297 | C18orf1 | Chromosome 18 open reading frame 1 | 236.8 | 193.5 | −1.22 | 3.3E−03 |
| 225247_at | 298 | C19orf6 | chromosome 19 open reading frame 6 | 937.6 | 763.7 | −1.23 | 1.4E−02 |
| 202729_s_at | 299 | LTBP1 | latent transforming growth factor beta binding protein 1 | 159.6 | 129.0 | −1.24 | 2.7E−02 |
| 233350_s_at | 300 | TEX264 | testis expressed sequence 264 | 266.1 | 215.0 | −1.24 | 6.6E−03 |
| 1556338_at | 301 | UBE1C | Ubiquitin-activating enzyme E1C (UBA3 homolog, yeast) | 85.6 | 69.1 | −1.24 | 2.8E−02 |
| 244026_at | 302 | ELL2 | Elongation factor, RNA polymerase II, 2 | 66.0 | 53.1 | −1.24 | 6.7E−03 |
| 202932_at | 303 | YES1 | v-yes-1 Yamaguchi sarcoma viral oncogene homolog 1 | 302.8 | 237.2 | −1.28 | 1.9E−02 |
| 201163_s_at | 304 | IGFBP7 | insulin-like growth factor binding protein 7 | 353.6 | 275.9 | −1.28 | 2.2E−02 |
| 212081_x_at | 305 | BAT2 | HLA-B associated transcript 2 | 272.0 | 212.2 | −1.28 | 1.6E−03 |
| 243006_at | 306 | FYN | FYN oncogene related to SRC, FGR, YES | 605.3 | 470.5 | −1.29 | 2.3E−02 |
| 224376_s_at | 307 | C20orf24 | chromosome 20 open reading frame 24 | 2071.4 | 1608.8 | −1.29 | 2.0E−02 |
| 240038_at | 308 | ELL2 | Elongation factor, RNA polymerase II, 2 | 380.3 | 295.2 | −1.29 | 1.2E−03 |
| 224496_s_at | 309 | MGC10744 | hypothetical protein MGC10744 | 368.1 | 285.3 | −1.29 | 5.2E−03 |
| 222687_s_at | 310 | PHCA | phytoceramidase, alkaline | 66.7 | 51.7 | −1.29 | 2.2E−02 |
| 204443_at | 311 | ARSA | arylsulfatase A | 142.9 | 110.3 | −1.30 | 4.7E−03 |
| 215813_s_at | 312 | PTGS1 | prostaglandin-endoperoxide synthase 1 | 287.2 | 221.5 | −1.30 | 2.6E−03 |
| 219090_at | 313 | SLC24A3 | solute carrier family 24 (sodium/potassium/calcium | 110.5 | 85.1 | −1.30 | 2.9E−02 |
| | | | exchanger), member 3 | | | | |
| 204232_at | 314 | FCER1G | Fc fragment of IgE, high affinity I, receptor for; gamma | 727.1 | 559.0 | −1.30 | 1.3E−02 |
| | | | polypeptide | | | | |
| 208777_s_at | 315 | PSMD11 | proteasome (prosome, macropain) 26S subunit, non-ATPase, | 595.3 | 457.5 | −1.30 | 2.8E−02 |
| | | | 11 | | | | |
| 241985_at | 316 | JMY | junction-mediating and regulatory protein | 495.0 | 379.9 | −1.30 | 1.8E−03 |
| 233127_at | 317 | ZNF331 | Zinc finger protein 331 | 246.6 | 188.2 | −1.31 | 4.8E−03 |
| 1552628_a_at | 318 | FLJ22313 | hypothetical protein FLJ22313 | 214.5 | 163.1 | −1.32 | 1.9E−02 |
| 201466_s_at | 319 | JUN | v-jun sarcoma virus 17 oncogene homolog (avian) | 1391.1 | 1057.4 | −1.32 | 4.4E−03 |
| 213183_s_at | 320 | CDKN1C | Cyclin-dependent kinase inhibitor 1C (p57, Kip2) | 52.7 | 40.0 | −1.32 | 1.7E−03 |
| 209305_s_at | 321 | GADD45B | growth arrest and DNA-damage-inducible, beta | 146.7 | 110.9 | −1.32 | 3.1E−02 |
| 209301_at | 322 | CA2 | carbonic anhydrase II | 167.0 | 126.1 | −1.32 | 1.6E−02 |
| 212062_at | 323 | ATP9A | ATPase, Class II, type 9A | 159.3 | 120.3 | −1.32 | 6.4E−03 |
| 227647_at | 324 | KCNE3 | potassium voltage-gated channel, Isk-related family, member 3 | 117.0 | 88.1 | −1.33 | 4.0E−03 |
| 209199_s_at | 325 | MEF2C | MADS box transcription enhancer factor 2, polypeptide C | 482.1 | 362.9 | −1.33 | 2.5E−03 |
| | | | (myocyte enhancer factor 2C) | | | | |
| 200869_at | 326 | RPL18A | ribosomal protein L18a | 1154.0 | 859.9 | −1.34 | 1.0E−02 |
| 208931_s_at | 327 | ILF3 | interleukin enhancer binding factor 3, 90 kDa | 362.4 | 269.0 | −1.35 | 2.6E−03 |
| 223204_at | 328 | DKFZp434L142 | hypothetical protein DKFZp434L142 | 83.7 | 61.7 | −1.36 | 2.4E−02 |
| 201278_at | 329 | DAB2 | Disabled homolog 2, mitogen-responsive phosphoprotein | 127.5 | 94.0 | −1.36 | 2.6E−03 |
| 231225_at | 330 | | | 116.3 | 85.6 | −1.36 | 2.3E−03 |
| 204141_at | 331 | TUBB2 | tubulin, beta 2 | 1463.0 | 1068.9 | −1.37 | 1.2E−03 |
| 230645_at | 332 | FRMD3 | FERM domain containing 3 | 167.9 | 122.2 | −1.37 | 1.8E−02 |
| 205859_at | 333 | LY86 | lymphocyte antigen 86 | 346.9 | 251.9 | −1.38 | 1.3E−02 |
| 243618_s_at | 334 | LOC152485 | Hypothetical protein LOC152485 | 273.7 | 198.2 | −1.38 | 9.5E−05 |
| 203827_at | 335 | WIPI49 | WD40 repeat protein Interacting with phosphoInositides of | 97.7 | 70.3 | −1.39 | 6.7E−03 |
| | | | 49 kDa | | | | |
| 227798_at | 336 | SMAD1 | SMAD, mothers against DPP homolog 1 (Drosophila) | 43.5 | 31.3 | −1.39 | 1.2E−02 |
| 208893_s_at | 337 | DUSP6 | dual specificity phosphatase 6 | 147.1 | 105.1 | −1.40 | 3.3E−03 |
| 241702_at | 338 | HNRPD | Heterogeneous nuclear ribonucleoprotein D | 327.6 | 233.3 | −1.40 | 5.7E−04 |
| 210836_x_at | 339 | PDE4D | phosphodiesterase 4D | 131.6 | 93.7 | −1.40 | 4.3E−05 |
| 229560_at | 340 | TLR8 | toll-like receptor 8 | 112.6 | 80.0 | −1.41 | 6.8E−03 |
| 209162_s_at | 341 | PRPF4 | PRP4 pre-mRNA processing factor 4 homolog (yeast) | 57.5 | 40.9 | −1.41 | 7.6E−03 |
| 228771_at | 342 | ADRBK2 | adrenergic, beta, receptor kinase 2 | 467.0 | 330.1 | −1.41 | 1.1E−03 |
| 227146_at | 343 | QSCN6L1 | quiescin Q6-like 1 | 1040.2 | 735.0 | −1.42 | 2.0E−03 |
| 216035_x_at | 344 | TCF7L2 | transcription factor 7-like 2 (T-cell specific, HMG-box) | 211.6 | 149.5 | −1.42 | 5.3E−03 |
| 207840_at | 345 | CD160 | CD160 antigen | 594.9 | 418.4 | −1.42 | 1.9E−03 |
| 203603_s_at | 346 | ZFHX1B | zinc finger homeobox 1b | 224.6 | 157.8 | −1.42 | 1.4E−03 |
| 215342_s_at | 347 | RABGAP1L | RAB GTPase activating protein 1-like | 66.4 | 46.6 | −1.42 | 7.4E−03 |
| 228638_at | 348 | MGC34648 | Family with sequence similarity 76, member A | 189.6 | 133.1 | −1.42 | 2.4E−03 |
| 230134_s_at | 349 | MNAB | membrane associated DNA binding protein | 559.5 | 392.7 | −1.42 | 1.5E−05 |
| 220439_at | 350 | RIN3 | Ras and Rab interactor 3 | 104.5 | 73.2 | −1.43 | 5.4E−04 |
| 1559739_at | 351 | CHPT1 | Choline phosphotransferase 1 | 76.2 | 53.2 | −1.43 | 9.7E−04 |
| 223650_s_at | 352 | NRBF2 | nuclear receptor binding factor 2 | 72.7 | 50.8 | −1.43 | 1.3E−02 |
| 226982_at | 353 | ELL2 | elongation factor, RNA polymerase II, 2 | 462.1 | 321.9 | −1.44 | 2.5E−03 |
| 226763_at | 354 | SESTD1 | SEC14 and spectrin domains 1 | 100.9 | 70.3 | −1.44 | 6.1E−04 |
| 1555890_at | 355 | OR2A20P | Olfactory receptor, family 2, subfamily A, member 20 | 78.4 | 54.6 | −1.44 | 1.4E−02 |
| | | | pseudogene | | | | |
| 208703_s_at | 356 | APLP2 | amyloid beta (A4) precursor-like protein 2 | 303.4 | 209.5 | −1.45 | 1.2E−03 |
| 226841_at | 357 | MPEG1 | macrophage expressed gene 1 | 322.0 | 221.7 | −1.45 | 4.6E−03 |
| 220005_at | 358 | P2RY13 | purinergic receptor P2Y, G-protein coupled, 13 | 40.9 | 28.2 | −1.45 | 1.9E−02 |
| 206036_s_at | 359 | REL | v-rel reticuloendotheliosis viral oncogene homolog (avian) | 126.1 | 86.7 | −1.45 | 7.5E−04 |
| 202437_s_at | 360 | CYP1B1 | cytochrome P450, family 1, subfamily B, polypeptide 1 | 32.2 | 22.1 | −1.46 | 2.8E−03 |
| 202933_s_at | 361 | YES1 | v-yes-1 Yamaguchi sarcoma viral oncogene homolog 1 | 543.7 | 372.9 | −1.46 | 2.3E−04 |
| 208892_s_at | 362 | DUSP6 | dual specificity phosphatase 6 | 223.4 | 153.1 | −1.46 | 9.6E−04 |
| 213566_at | 363 | RNASE6 | ribonuclease, RNase A family, k6 /// ribonuclease, RNase A | 213.5 | 146.0 | −1.46 | 9.3E−03 |
| | | | family, k6 | | | | |
| 221731_x_at | 364 | CSPG2 | chondroitin sulfate proteoglycan 2 (versican) | 1677.8 | 1145.3 | −1.47 | 3.4E−03 |
| 1558739_at | 365 | DUSP16 | Dual specificity phosphatase 16 | 114.0 | 77.6 | −1.47 | 1.9E−03 |
| 226865_at | 366 | | MRNA; cDNA DKFZp564O0862 (from clone | 96.4 | 65.6 | −1.47 | 2.2E−03 |
| | | | DKFZp564O0862) | | | | |
| 221676_s_at | 367 | CORO1C | coronin, actin binding protein, 1C | 122.1 | 83.1 | −1.47 | 1.7E−04 |
| 216037_x_at | 368 | TCF7L2 | transcription factor 7-like 2 (T-cell specific, HMG-box) | 143.2 | 97.4 | −1.47 | 1.7E−03 |
| 207550_at | 369 | MPL | myeloproliferative leukemia virus oncogene | 66.7 | 45.3 | −1.47 | 2.0E−03 |
| 209967_s_at | 370 | CREM | cAMP responsive element modulator | 1515.2 | 1029.7 | −1.47 | 7.8E−04 |
| 210837_s_at | 371 | PDE4D | phosphodiesterase 4D, cAMP-specific | 123.2 | 83.7 | −1.47 | 6.9E−05 |
| 243683_at | 372 | MORF4L2 | Mortality factor 4 like 2 | 80.6 | 54.4 | −1.48 | 1.8E−02 |
| 204834_at | 373 | FGL2 | fibrinogen-like 2 | 211.1 | 141.9 | −1.49 | 5.0E−03 |
| 240221_at | 374 | CSNK1A1 | Casein kinase 1, alpha 1 | 281.5 | 189.1 | −1.49 | 3.7E−04 |
| 240024_at | 375 | SEC14L2 | SEC14-like 2 (S. cerevisiae) | 164.1 | 110.1 | −1.49 | 1.3E−04 |
| 205789_at | 376 | CD1D | CD1D antigen, d polypeptide | 51.7 | 34.7 | −1.49 | 7.6E−03 |
| 235592_at | 377 | ELL2 | Elongation factor, RNA polymerase II, 2 | 273.5 | 182.8 | −1.50 | 6.5E−04 |
| 215440_s_at | 378 | BEXL1 | brain expressed X-linked-like 1 | 515.3 | 344.2 | −1.50 | 3.7E−03 |
| 226152_at | 379 | TTC7B | tetratricopeptide repeat domain 7B | 47.3 | 31.6 | −1.50 | 1.9E−02 |
| 216202_s_at | 380 | SPTLC2 | serine palmitoyltransferase, long chain base subunit 2 | 72.6 | 48.4 | −1.50 | 2.5E−03 |
| 223940_x_at | 381 | MALAT1 | metastasis associated lung adenocarcinoma transcript 1 (non- | 317.3 | 211.3 | −1.50 | 1.6E−03 |
| | | | coding RNA) | | | | |
| 219667_s_at | 382 | BANK1 | B-cell scaffold protein with ankyrin repeats 1 | 186.1 | 123.6 | −1.51 | 2.8E−04 |
| 217805_at | 383 | ILF3 | interleukin enhancer binding factor 3, 90 kDa | 200.4 | 133.1 | −1.51 | 2.0E−03 |
| 204620_s_at | 384 | CSPG2 | chondroitin sulfate proteoglycan 2 (versican) | 466.9 | 309.9 | −1.51 | 2.4E−03 |
| 205686_s_at | 385 | CD86 | CD86 antigen (CD28 antigen ligand 2, B7-2 antigen) | 78.0 | 51.6 | −1.51 | 7.1E−04 |
| 212651_at | 386 | RHOBTB1 | Rho-related BTB domain containing 1 | 33.1 | 21.9 | −1.51 | 3.2E−03 |
| 232027_at | 387 | SYNE1 | spectrin repeat containing, nuclear envelope 1 | 186.1 | 122.7 | −1.52 | 3.6E−04 |
| 233614_at | 388 | CBLB | Cas-Br-M (murine) ecotropic retroviral transforming | 91.8 | 60.4 | −1.52 | 3.0E−04 |
| | | | sequence b | | | | |
| 203392_s_at | 389 | CTBP1 | C-terminal binding protein 1 | 5636.1 | 3710.4 | −1.52 | 2.5E−03 |
| 229128_s_at | 390 | ANP32E | Acidic (leucine-rich) nuclear phosphoprotein 32 family, | 69.0 | 45.4 | −1.52 | 6.8E−03 |
| | | | member E | | | | |
| 226818_at | 391 | MPEG1 | macrophage expressed gene 1 | 402.1 | 263.0 | −1.53 | 1.0E−03 |
| 223343_at | 392 | MS4A7 | membrane-spanning 4-domains, subfamily A, member 7 | 410.6 | 268.1 | −1.53 | 7.1E−03 |
| 210146_x_at | 393 | LILRB2 | leukocyte immunoglobulin-like receptor, subfamily B, | 42.7 | 27.8 | −1.53 | 3.0E−03 |
| | | | member 2 | | | | |
| 203817_at | 394 | GUCY1B3 | guanylate cyclase 1, soluble, beta 3 | 168.0 | 109.4 | −1.54 | 1.8E−03 |
| 1553681_a_at | 395 | PRF1 | perforin 1 (pore forming protein) | 234.0 | 152.2 | −1.54 | 3.1E−04 |
| 243296_at | 396 | PBEF1 | Pre-B-cell colony enhancing factor 1 | 351.7 | 228.7 | −1.54 | 4.6E−03 |
| 208146_s_at | 397 | CPVL | carboxypeptidase, vitellogenic-like | 159.4 | 103.1 | −1.55 | 7.3E−03 |
| 225567_at | 398 | | Hypothetical LOC388114 | 131.4 | 85.0 | −1.55 | 1.7E−03 |
| 201635_s_at | 399 | FXR1 | fragile X mental retardation, autosomal homolog 1 | 157.3 | 101.5 | −1.55 | 8.3E−05 |
| 223922_x_at | 400 | MS4A6A | membrane-spanning 4-domains, subfamily A, member 6A | 241.4 | 155.5 | −1.55 | 7.7E−04 |
| 206488_s_at | 401 | CD36 | CD36 antigen (collagen type I receptor, thrombospondin | 48.2 | 31.0 | −1.55 | 6.0E−03 |
| | | | receptor) | | | | |
| 203799_at | 402 | CD302 | CD302 antigen | 185.9 | 119.6 | −1.55 | 3.7E−03 |
| 211676_s_at | 403 | IFNGR1 | interferon gamma receptor 1 | 194.6 | 125.2 | −1.55 | 3.0E−04 |
| 207795_s_at | 404 | KLRD1 | killer cell lectin-like receptor subfamily D, member 1 | 408.3 | 262.4 | −1.56 | 1.3E−03 |
| 203922_s_at | 405 | CYBB | cytochrome b-245, beta polypeptide (chronic granulomatous | 129.1 | 82.9 | −1.56 | 1.0E−03 |
| | | | disease) | | | | |
| 211397_x_at | 406 | KIR2DL2 | killer cell immunoglobulin-like receptor, two domains, long | 134.9 | 86.6 | −1.56 | 3.2E−04 |
| | | | cytoplasmic tail, 2 | | | | |
| 207540_s_at | 407 | SYK | spleen tyrosine kinase | 612.6 | 392.7 | −1.56 | 1.9E−04 |
| 228030_at | 408 | RBM6 | RNA binding motif protein 6 | 68.5 | 43.8 | −1.56 | 9.8E−03 |
| 1553704_x_at | 409 | | CDNA FLJ13242 fis, clone OVARC1000578 | 402.5 | 257.4 | −1.56 | 5.8E−06 |
| 1558710_at | 410 | ARIH1 | Ariadne homolog, ubiquitin-conjugating enzyme E2 binding | 378.3 | 241.8 | −1.56 | 2.6E−03 |
| | | | protein, 1 | | | | |
| 1552398_a_at | 411 | CLEC12A | C-type lectin domain family 12, member A | 309.8 | 198.0 | −1.56 | 1.7E−03 |
| 217739_s_at | 412 | PBEF1 | pre-B-cell colony enhancing factor 1 | 700.6 | 447.6 | −1.57 | 1.2E−03 |
| 241403_at | 413 | CLK4 | CDC-like kinase 4 | 101.4 | 64.7 | −1.57 | 1.2E−03 |
| 225782_at | 414 | MSRB3 | methionine sulfoxide reductase B3 | 62.4 | 39.8 | −1.57 | 6.2E−04 |
| 209883_at | 415 | GLT25D2 | glycosyltransferase 25 domain containing 2 | 112.0 | 71.4 | −1.57 | 1.9E−04 |
| 205997_at | 416 | ADAM28 | ADAM metallopeptidase domain 28 | 84.8 | 53.9 | −1.57 | 5.5E−05 |
| 227088_at | 417 | PDE5A | phosphodiesterase 5A, cGMP-specific | 73.1 | 46.5 | −1.57 | 2.2E−03 |
| 226489_at | 418 | TMCC3 | transmembrane and coiled-coil domain family 3 | 106.4 | 67.6 | −1.57 | 5.1E−04 |
| 220122_at | 419 | MCTP1 | multiple C2-domains with two transmembrane regions 1 | 55.1 | 35.0 | −1.58 | 1.6E−03 |
| 228049_x_at | 420 | | Transcribed locus | 463.0 | 293.5 | −1.58 | 1.5E−06 |
| 244804_at | 421 | SQSTM1 | Sequestosome 1 | 1147.8 | 726.4 | −1.58 | 2.0E−04 |
| 227889_at | 422 | FLJ20481 | hypothetical protein FLJ20481 | 39.6 | 25.0 | −1.58 | 7.5E−05 |
| 224657_at | 423 | ERRFI1 | ERBB receptor feedback inhibitor 1 | 408.7 | 257.8 | −1.59 | 1.9E−04 |
| 213830_at | 424 | TRD@ | T cell receptor delta locus | 1434.6 | 904.8 | −1.59 | 9.3E−04 |
| 1569856_at | 425 | TPP2 | tripeptidyl peptidase II | 167.2 | 105.1 | −1.59 | 4.3E−06 |
| 201218_at | 426 | CTBP2 | C-terminal binding protein 2 | 292.5 | 183.7 | −1.59 | 3.7E−04 |
| 201506_at | 427 | TGFBI | transforming growth factor, beta-induced, 68 kDa | 273.2 | 170.9 | −1.60 | 9.5E−04 |
| 210660_at | 428 | LILRA1 | leukocyte immunoglobulin-like receptor, subfamily A (with | 251.0 | 156.8 | −1.60 | 1.2E−03 |
| | | | TM domain) | | | | |
| 217764_s_at | 429 | RAB31 | RAB31, member RAS oncogene family | 472.6 | 295.1 | −1.60 | 4.3E−03 |
| 208750_s_at | 430 | ARF1 | ADP-ribosylation factor 1 | 107.2 | 66.9 | −1.60 | 5.1E−03 |
| 212382_at | 431 | TCF4 | Transcription factor 4 | 76.9 | 48.0 | −1.60 | 7.4E−06 |
| 231777_at | 432 | CSNK2B | Casein kinase 2, beta polypeptide | 81.0 | 50.5 | −1.60 | 1.1E−04 |
| 202381_at | 433 | ADAM9 | ADAM metallopeptidase domain 9 (meltrin gamma) | 85.7 | 53.2 | −1.61 | 1.6E−04 |
| 206666_at | 434 | GZMK | granzyme K (granzyme 3; tryptase II) | 1619.7 | 1004.5 | −1.61 | 6.8E−05 |
| 223344_s_at | 435 | MS4A7 | membrane-spanning 4-domains, subfamily A, member 7 | 125.1 | 77.4 | −1.61 | 2.3E−02 |
| 221841_s_at | 436 | KLF4 | Kruppel-like factor 4 (gut) | 2386.0 | 1475.8 | −1.62 | 4.0E−04 |
| 204621_s_at | 437 | NR4A2 | nuclear receptor subfamily 4, group A, member 2 | 1681.2 | 1039.7 | −1.62 | 3.5E−05 |
| 211478_s_at | 438 | DPP4 | dipeptidylpeptidase 4 (CD26, adenosine deaminase | 87.7 | 54.1 | −1.62 | 1.8E−03 |
| | | | complexing protein 2) | | | | |
| 240240_at | 439 | UBE2J2 | Ubiquitin-conjugating enzyme E2, J2 (UBC6 homolog, | 93.8 | 57.8 | −1.62 | 1.3E−05 |
| | | | yeast) | | | | |
| 204015_s_at | 440 | DUSP4 | dual specificity phosphatase 4 | 161.5 | 99.4 | −1.62 | 4.1E−05 |
| 200751_s_at | 441 | HNRPC | heterogeneous nuclear ribonucleoprotein C (C1/C2) | 48.5 | 29.7 | −1.63 | 1.9E−03 |
| 230983_at | 442 | BCNP1 | B-cell novel protein 1 | 488.5 | 298.8 | −1.63 | 3.9E−05 |
| 223125_s_at | 443 | C1orf21 | chromosome 1 open reading frame 21 | 756.2 | 461.1 | −1.64 | 6.6E−05 |
| 217762_s_at | 444 | RAB31 | RAB31, member RAS oncogene family | 554.1 | 337.8 | −1.64 | 5.8E−03 |
| 210555_s_at | 445 | NFATC3 | nuclear factor of activated T-cells, cytoplasmic, calcineurin- | 527.4 | 321.1 | −1.64 | 3.3E−04 |
| | | | dependent 3 | | | | |
| 211824_x_at | 446 | NALP1 | NACHT, leucine rich repeat and PYD (pyrin domain) | 231.4 | 140.7 | −1.64 | 1.4E−04 |
| | | | containing 1 | | | | |
| 201104_x_at | 447 | AG1 | AG1 protein | 434.2 | 264.0 | −1.64 | 9.8E−04 |
| 204285_s_at | 448 | PMAIP1 | phorbol-12-myristate-13-acetate-induced protein 1 | 1151.8 | 699.9 | −1.65 | 2.5E−04 |
| 201798_s_at | 449 | FER1L3 | fer-1-like 3, myoferlin (C. elegans) | 117.2 | 71.2 | −1.65 | 1.9E−03 |
| 210778_s_at | 450 | MXD4 | MAX dimerization protein 4 | 347.9 | 211.1 | −1.65 | 3.1E−06 |
| 208891_at | 451 | DUSP6 | dual specificity phosphatase 6 | 188.8 | 114.4 | −1.65 | 1.9E−05 |
| 208438_s_at | 452 | FGR | Gardner-Rasheed feline sarcoma viral (v-fgr) oncogene | 408.8 | 247.4 | −1.65 | 3.6E−06 |
| | | | homolog | | | | |
| 39318_at | 453 | TCL1A | T-cell leukemia/lymphoma 1A | 156.1 | 94.3 | −1.66 | 5.2E−04 |
| 211532_x_at | 454 | KIR2DS2 | killer cell immunoglobulin-like receptor, two domains, short | 212.6 | 128.1 | −1.66 | 6.7E−04 |
| | | | cytoplasmic tail, 2 | | | | |
| 226023_at | 455 | MAP2K7 | mitogen-activated protein kinase kinase 7 | 181.6 | 109.3 | −1.66 | 1.1E−05 |
| 201341_at | 456 | ENC1 | ectodermal-neural cortex (with BTB-like domain) | 797.8 | 479.7 | −1.66 | 3.0E−06 |
| 231889_at | 457 | RBAF600 | retinoblastoma-associated factor 600 | 143.4 | 86.1 | −1.67 | 1.8E−05 |
| 241762_at | 458 | | | 67.3 | 40.4 | −1.67 | 2.8E−06 |
| 206414_s_at | 459 | DDEF2 | development and differentiation enhancing factor 2 | 168.4 | 100.8 | −1.67 | 5.9E−04 |
| 209995_s_at | 460 | TCL1A | T-cell leukemia/lymphoma 1A /// T-cell leukemia/lymphoma | 262.7 | 157.1 | −1.67 | 6.5E−04 |
| | | | 1A | | | | |
| 214958_s_at | 461 | EVER1 | epidermodysplasia verruciformis 1 | 488.7 | 292.1 | −1.67 | 2.9E−04 |
| 202464_s_at | 462 | PFKFB3 | 6-phosphofructo-2-kinase/fructose-2,6-biphosphatase 3 | 1425.4 | 850.3 | −1.68 | 8.0E−06 |
| 201906_s_at | 463 | CTDSPL | carboxy-terminal domain, RNA polymerase II, polypeptide | 262.5 | 156.2 | −1.68 | 6.8E−04 |
| | | | A small phosphatase-like | | | | |
| 228204_at | 464 | PSMB4 | Proteasome (prosome, macropain) subunit, beta type, 4 | 189.6 | 112.7 | −1.68 | 4.1E−04 |
| 224576_at | 465 | KIAA1181 | endoplasmic reticulum-golgi intermediate compartment 32 kDa | 626.0 | 371.7 | −1.68 | 3.6E−06 |
| | | | protein | | | | |
| 210164_at | 466 | GZMB | granzyme B | 2606.6 | 1546.0 | −1.69 | 7.0E−07 |
| 1555117_at | 467 | | | 122.1 | 72.4 | −1.69 | 1.1E−05 |
| 243115_at | 468 | | Transcribed locus | 41.3 | 24.4 | −1.69 | 2.0E−04 |
| 225466_at | 469 | FLJ36874 | hypothetical protein FLJ36874 | 822.1 | 485.3 | −1.69 | 8.0E−06 |
| 207723_s_at | 470 | KLRC3 | killer cell lectin-like receptor subfamily C, member 3 | 194.8 | 114.9 | −1.70 | 3.9E−04 |
| 223126_s_at | 471 | C1orf21 | chromosome 1 open reading frame 21 | 172.3 | 101.6 | −1.70 | 5.0E−06 |
| 226018_at | 472 | Ells1 | hypothetical protein Ells1 | 478.6 | 280.7 | −1.70 | 2.5E−05 |
| 221293_s_at | 473 | DEF6 | differentially expressed in FDCP 6 homolog (mouse) | 158.7 | 92.9 | −1.71 | 1.7E−05 |
| 215047_at | 474 | TRIM58 | tripartite motif-containing 58 | 41.7 | 24.4 | −1.71 | 1.4E−03 |
| 206363_at | 475 | MAF | v-maf musculoaponeurotic fibrosarcoma oncogene homolog | 926.4 | 541.9 | −1.71 | 2.7E−05 |
| | | | (avian) | | | | |
| 212843_at | 476 | NCAM1 | neural cell adhesion molecule 1 | 418.3 | 244.4 | −1.71 | 7.0E−07 |
| 1555705_a_at | 477 | CKLFSF3 | chemokine-like factor superfamily 3 | 521.1 | 304.2 | −1.71 | 8.0E−07 |
| 204466_s_at | 478 | SNCA | synuclein, alpha | 281.6 | 164.1 | −1.72 | 3.5E−05 |
| 217388_s_at | 479 | KYNU | kynureninase (L-kynurenine hydrolase) | 176.1 | 102.6 | −1.72 | 1.6E−04 |
| 206283_s_at | 480 | TAL1 | T-cell acute lymphocytic leukemia 1 | 123.3 | 71.7 | −1.72 | 2.7E−04 |
| 204249_s_at | 481 | LMO2 | LIM domain only 2 (rhombotin-like 1) | 205.5 | 119.4 | −1.72 | 1.1E−04 |
| 208782_at | 482 | FSTL1 | follistatin-like 1 | 191.3 | 110.8 | −1.73 | 1.1E−04 |
| 203923_s_at | 483 | CYBB | cytochrome b-245, beta polypeptide | 246.0 | 142.2 | −1.73 | 9.2E−04 |
| 224925_at | 484 | PREX1 | phosphatidylinositol 3,4,5-trisphosphate-dependent RAC | 924.7 | 534.6 | −1.73 | 2.4E−06 |
| | | | exchanger 1 | | | | |
| 205987_at | 485 | CD1C | CD1C antigen, c polypeptide | 157.0 | 90.7 | −1.73 | 1.8E−05 |
| 205758_at | 486 | CD8A | CD8 antigen | 658.7 | 380.5 | −1.73 | 3.0E−06 |
| 1555756_a_at | 487 | CLEC7A | C-type lectin domain family 7, member A | 33.4 | 19.2 | −1.73 | 1.2E−02 |
| 202917_s_at | 488 | S100A8 | S100 calcium binding protein A8 (calgranulin A) | 4374.7 | 2519.0 | −1.74 | 1.0E−03 |
| 215275_at | 489 | TRAF3IP3 | TRAF3 interacting protein 3 | 84.9 | 48.9 | −1.74 | 1.4E−04 |
| 207156_at | 490 | HIST1H2AG | histone 1, H2ag | 120.4 | 69.2 | −1.74 | 3.4E−03 |
| 214567_s_at | 491 | XCL1 | chemokine (C motif) ligand 1 | 217.3 | 124.4 | −1.75 | 5.7E−06 |
| 222892_s_at | 492 | TMEM40 | transmembrane protein 40 | 268.7 | 153.4 | −1.75 | 9.9E−05 |
| 205128_x_at | 493 | PTGS1 | prostaglandin-endoperoxide synthase 1 | 614.8 | 350.3 | −1.76 | 1.4E−04 |
| 207163_s_at | 494 | AKT1 | v-akt murine thymoma viral oncogene homolog 1 | 243.5 | 138.6 | −1.76 | 1.2E−06 |
| 215684_s_at | 495 | ASCC2 | activating signal cointegrator 1 complex subunit 2 | 160.1 | 91.0 | −1.76 | 1.0E−05 |
| 223280_x_at | 496 | MS4A6A | membrane-spanning 4-domains, subfamily A, member 6A | 538.0 | 305.0 | −1.76 | 2.4E−04 |
| 221986_s_at | 497 | KLHL24 | kelch-like 24 (Drosophila) | 513.2 | 290.7 | −1.76 | 5.9E−05 |
| 222483_at | 498 | EFHD2 | EF-hand domain family, member D2 | 805.2 | 454.4 | −1.77 | <1.0E−07 |
| 205826_at | 499 | MYOM2 | myomesin (M-protein) 2, 165 kDa /// myomesin (M-protein) | 1350.7 | 761.8 | −1.77 | 1.5E−02 |
| | | | 2, 165 kDa | | | | |
| 226034_at | 500 | | Homo sapiens, clone IMAGE: 3881549, mRNA | 376.1 | 212.0 | −1.77 | 1.5E−05 |
| 229778_at | 501 | MGC10946 | Hypothetical protein MGC10946 | 31.0 | 17.5 | −1.77 | 1.3E−03 |
| 204286_s_at | 502 | PMAIP1 | phorbol-12-myristate-13-acetate-induced protein 1 | 565.0 | 318.4 | −1.77 | 3.3E−05 |
| 217223_s_at | 503 | BCR | breakpoint cluster region | 151.1 | 85.1 | −1.78 | 1.9E−05 |
| 219878_s_at | 504 | KLF13 | Kruppel-like factor 13 | 239.9 | 135.1 | −1.78 | 2.2E−06 |
| 242352_at | 505 | NIPBL | Nipped-B homolog (Drosophila) | 130.5 | 73.3 | −1.78 | 3.0E−07 |
| 204860_s_at | 506 | BIRC1 | baculoviral IAP repeat-containing 1 | 158.1 | 88.7 | −1.78 | 6.0E−04 |
| 219228_at | 507 | ZNF331 | zinc finger protein 331 | 1917.2 | 1075.9 | −1.78 | 1.8E−05 |
| 210417_s_at | 508 | PIK4CB | phosphatidylinositol 4-kinase, catalytic, beta polypeptide | 105.9 | 59.3 | −1.78 | 1.2E−05 |
| 239555_at | 509 | LYN | V-yes-1 Yamaguchi sarcoma viral related oncogene | 229.5 | 128.5 | −1.79 | 7.0E−07 |
| | | | homolog | | | | |
| 208450_at | 510 | LGALS2 | lectin, galactoside-binding, soluble, 2 (galectin 2) | 202.6 | 113.4 | −1.79 | 8.7E−04 |
| 212000_at | 511 | SFRS14 | splicing factor, arginine/serine-rich 14 | 170.7 | 95.4 | −1.79 | 9.0E−07 |
| 218856_at | 512 | TNFRSF21 | tumor necrosis factor receptor superfamily, member 21 | 225.0 | 125.6 | −1.79 | 6.4E−06 |
| 218718_at | 513 | PDGFC | platelet derived growth factor C | 90.3 | 50.3 | −1.79 | 7.7E−05 |
| 205119_s_at | 514 | FPR1 | formyl peptide receptor 1 /// formyl peptide receptor 1 | 230.2 | 128.3 | −1.80 | 1.3E−04 |
| 1554309_at | 515 | EIF4G3 | eukaryotic translation initiation factor 4 gamma, 3 | 215.9 | 120.2 | −1.80 | 2.0E−07 |
| 223364_s_at | 516 | DHX37 | DEAH (Asp-Glu-Ala-His) box polypeptide 37 | 148.4 | 82.6 | −1.80 | 4.0E−07 |
| 207414_s_at | 517 | PCSK6 | proprotein convertase subtilisin/kexin type 6 | 51.8 | 28.8 | −1.80 | 4.6E−05 |
| 228195_at | 518 | MGC13057 | Hypothetical protein MGC13057 | 217.7 | 120.8 | −1.80 | 8.1E−04 |
| 204069_at | 519 | MEIS1 | Meis1, myeloid ecotropic viral integration site 1 homolog | 140.9 | 77.9 | −1.81 | 3.7E−04 |
| | | | (mouse) | | | | |
| 210338_s_at | 520 | HSPA8 | heat shock 70 kDa protein 8 | 462.4 | 255.6 | −1.81 | 1.5E−03 |
| 203066_at | 521 | GALNAC4S | B cell RAG associated protein | 597.0 | 330.1 | −1.81 | 2.3E−04 |
| 213300_at | 522 | KIAA0404 | KIAA0404 protein | 680.5 | 375.8 | −1.81 | 1.0E−06 |
| 226279_at | 523 | PRSS23 | protease, serine, 23 | 225.6 | 124.4 | −1.81 | 7.3E−06 |
| 206857_s_at | 524 | FKBP1B | FK506 binding protein 1B, 12.6 kDa | 130.8 | 72.1 | −1.82 | 3.2E−06 |
| 208776_at | 525 | PSMD11 | proteasome (prosome, macropain) 26S subunit, non-ATPase, | 1201.1 | 661.2 | −1.82 | <1.0E−07 |
| | | | 11 | | | | |
| 206722_s_at | 526 | EDG4 | endothelial differentiation, lysophosphatidic acid G-protein- | 261.0 | 143.6 | −1.82 | 9.0E−07 |
| | | | coupled receptor, 4 | | | | |
| 217427_s_at | 527 | HIRA | HIR histone cell cycle regulation defective homolog A | 289.4 | 159.0 | −1.82 | 1.4E−06 |
| | | | (S. cerevisiae) | | | | |
| 239027_at | 528 | DOCK8 | dedicator of cytokinesis 8 | 258.4 | 141.8 | −1.82 | 4.4E−05 |
| 217817_at | 529 | ARPC4 | actin related protein 2/3 complex, subunit 4, 20 kDa | 1429.8 | 784.1 | −1.82 | 4.0E−07 |
| 215023_s_at | 530 | PEX1 | peroxisome biogenesis factor 1 | 70.2 | 38.4 | −1.83 | 3.2E−05 |
| 230903_s_at | 531 | INM01 | Chromosome 8 open reading frame 42 | 127.9 | 70.0 | −1.83 | 3.6E−04 |
| 202455_at | 532 | HDAC5 | histone deacetylase 5 | 459.1 | 250.7 | −1.83 | 1.0E−07 |
| 204619_s_at | 533 | CSPG2 | chondroitin sulfate proteoglycan 2 (versican) | 114.3 | 62.4 | −1.83 | 3.6E−03 |
| 204663_at | 534 | ME3 | malic enzyme 3, NADP(+)-dependent, mitochondrial | 142.3 | 77.6 | −1.83 | 3.9E−06 |
| 205098_at | 535 | CCR1 | chemokine (C-C motif) receptor 1 | 108.4 | 59.1 | −1.84 | 1.1E−03 |
| 206366_x_at | 536 | XCL2 | chemokine (C motif) ligand 2 | 275.5 | 150.0 | −1.84 | 5.0E−07 |
| 204655_at | 537 | CCL5 | chemokine (C-C motif) ligand 5 /// chemokine (C-C motif) | 1263.2 | 687.0 | −1.84 | <1.0E−07 |
| | | | ligand 5 | | | | |
| 204875_s_at | 538 | GMDS | GDP-mannose 4,6-dehydratase | 203.2 | 110.4 | −1.84 | 3.8E−05 |
| 1405_i_at | 539 | CCL5 | chemokine (C-C motif) ligand 5 | 1231.0 | 668.9 | −1.84 | 1.3E−06 |
| 202897_at | 540 | PTPNS1 | protein tyrosine phosphatase, non-receptor type substrate 1 | 102.4 | 55.6 | −1.84 | 2.7E−04 |
| 203908_at | 541 | SLC4A4 | solute carrier family 4, sodium bicarbonate cotransporter, | 142.7 | 77.4 | −1.84 | 3.0E−07 |
| | | | member 4 | | | | |
| 210354_at | 542 | IFNG | interferon, gamma | 193.0 | 104.7 | −1.84 | 5.5E−03 |
| 212235_at | 543 | PLXND1 | plexin D1 | 486.8 | 264.1 | −1.84 | <1.0E−07 |
| 207428_x_at | 544 | CDC2L1 | cell division cycle 2-like 1 (PITSLRE proteins) | 237.8 | 128.9 | −1.84 | 3.0E−07 |
| 208714_at | 545 | NDUFV1 | NADH dehydrogenase (ubiquinone) flavoprotein 1, 51 kDa | 1750.6 | 948.9 | −1.84 | 2.0E−07 |
| 208960_s_at | 546 | KLF6 | Kruppel-like factor 6 | 96.8 | 52.4 | −1.85 | 2.3E−03 |
| 200885_at | 547 | RHOC | ras homolog gene family, member C | 272.8 | 147.6 | −1.85 | 1.0E−07 |
| 213891_s_at | 548 | TCF4 | Transcription factor 4 | 274.7 | 148.6 | −1.85 | <1.0E−07 |
| 211168_s_at | 549 | RENT1 | regulator of nonsense transcripts 1 | 1025.3 | 553.8 | −1.85 | 1.1E−05 |
| 209192_x_at | 550 | HTATIP | HIV-1 Tat interacting protein, 60 kDa | 148.6 | 80.2 | −1.85 | 3.0E−07 |
| 204993_at | 551 | GNAZ | guanine nucleotide binding protein (G protein), alpha z | 442.8 | 238.4 | −1.86 | 3.8E−05 |
| | | | polypeptide | | | | |
| 1552309_a_at | 552 | NEXN | nexilin (F actin binding protein) | 151.3 | 81.4 | −1.86 | 8.9E−05 |
| 212540_at | 553 | CDC34 | cell division cycle 34 | 348.0 | 186.9 | −1.86 | <1.0E−07 |
| 1555226_s_at | 554 | C1orf43 | chromosome 1 open reading frame 43 | 92.5 | 49.6 | −1.86 | 4.4E−04 |
| 216907_x_at | 555 | KIR3DL2 | killer cell immunoglobulin-like receptor, three domains, long | 150.2 | 80.4 | −1.87 | 1.2E−05 |
| | | | cytoplasmic tail, 2 | | | | |
| 227013_at | 556 | LATS2 | LATS, large tumor suppressor, homolog 2 (Drosophila) | 1475.0 | 789.5 | −1.87 | 1.0E−07 |
| 221214_s_at | 557 | NELF | nasal embryonic LHRH factor | 212.5 | 113.7 | −1.87 | 2.0E−07 |
| 201694_s_at | 558 | EGR1 | early growth response 1 | 1053.6 | 563.2 | −1.87 | 2.5E−04 |
| 201055_s_at | 559 | HNRPA0 | heterogeneous nuclear ribonucleoprotein A0 | 527.4 | 281.8 | −1.87 | 4.7E−06 |
| 218611_at | 560 | IER5 | immediate early response 5 | 2114.7 | 1128.6 | −1.87 | 3.0E−07 |
| 218272_at | 561 | FLJ20699 | hypothetical protein FLJ20699 | 937.5 | 498.5 | −1.88 | <1.0E−07 |
| 207857_at | 562 | LILRA2 | leukocyte immunoglobulin-like receptor, subfamily A (with | 112.7 | 59.9 | −1.88 | 4.8E−05 |
| | | | TM domain), member 2 | | | | |
| 37117_at | 563 | ARHGAP8 | Rho GTPase activating protein 8 /// PRR5-ARHGAP8 fusion | 101.6 | 53.9 | −1.88 | 1.0E−06 |
| 202084_s_at | 564 | SEC14L1 | SEC14-like 1 (S. cerevisiae) | 1229.8 | 652.6 | −1.88 | 2.1E−06 |
| 201583_s_at | 565 | SEC23B | Sec23 homolog B (S. cerevisiae) | 269.4 | 142.6 | −1.89 | 1.0E−07 |
| 222717_at | 566 | SDPR | serum deprivation response (phosphatidylserine binding | 185.6 | 98.1 | −1.89 | 1.4E−04 |
| | | | protein) | | | | |
| 1554821_a_at | 567 | ZBED1 | zinc finger, BED-type containing 1 | 136.5 | 72.1 | −1.89 | 6.0E−07 |
| 208478_s_at | 568 | BAX | BCL2-associated X protein | 77.2 | 40.7 | −1.89 | 8.3E−05 |
| 226068_at | 569 | SYK | Spleen tyrosine kinase | 449.2 | 237.1 | −1.89 | 6.0E−07 |
| 210627_s_at | 570 | GCS1 | glucosidase I | 328.4 | 172.4 | −1.91 | <1.0E−07 |
| 219256_s_at | 571 | SH3TC1 | SH3 domain and tetratricopeptide repeats 1 | 232.6 | 122.0 | −1.91 | 1.0E−07 |
| 201108_s_at | 572 | THBS1 | thrombospondin 1 | 205.3 | 107.7 | −1.91 | 1.4E−04 |
| 217854_s_at | 573 | POLR2E | polymerase (RNA) II (DNA directed) polypeptide E, 25 kDa | 547.0 | 286.0 | −1.91 | <1.0E−07 |
| 201059_at | 574 | CTTN | cortactin | 614.6 | 321.2 | −1.91 | 2.5E−05 |
| 237322_at | 575 | | Hypothetical protein LOC150271 | 171.4 | 89.6 | −1.91 | 8.5E−05 |
| 221969_at | 576 | PAX5 | Paired box gene 5 (B-cell lineage specific activator) | 196.3 | 102.5 | −1.91 | 1.0E−04 |
| 203680_at | 577 | PRKAR2B | protein kinase, cAMP-dependent, regulatory, type II, beta | 503.1 | 262.8 | −1.91 | 2.4E−04 |
| 1569599_at | 578 | SAMSN1 | SAM domain, SH3 domain and nuclear localisation signals, 1 | 30.6 | 16.0 | −1.92 | 3.0E−04 |
| 222407_s_at | 579 | ZFP106 | zinc finger protein 106 homolog (mouse) | 209.0 | 108.8 | −1.92 | 1.1E−05 |
| 211688_x_at | 580 | KIR3DL2 | | 187.9 | 97.8 | −1.92 | 4.2E−06 |
| 210624_s_at | 581 | ILVBL | ilvB (bacterial acetolactate synthase)-like | 512.6 | 266.7 | −1.92 | <1.0E−07 |
| 214487_s_at | 582 | RAP2A | RAP2A, member of RAS oncogene family | 106.5 | 55.3 | −1.93 | <1.0E−07 |
| 243107_at | 583 | CCR7 | Chemokine (C-C motif) receptor 7 | 65.2 | 33.8 | −1.93 | 5.6E−06 |
| 205349_at | 584 | GNA15 | guanine nucleotide binding protein (G protein), alpha 15 (Gq | 371.6 | 192.5 | −1.93 | <1.0E−07 |
| | | | class) | | | | |
| 1559910_at | 585 | FLJ20701 | Hypothetical protein FLJ20701 | 89.6 | 46.4 | −1.93 | 4.3E−04 |
| 211581_x_at | 586 | LST1 | leukocyte specific transcript 1 | 319.3 | 165.2 | −1.93 | 1.0E−07 |
| 224356_x_at | 587 | MS4A6A | membrane-spanning 4-domains, subfamily A, member 6A | 540.2 | 278.9 | −1.94 | 1.1E−04 |
| 212497_at | 588 | C14orf32 | chromosome 14 open reading frame 32 | 112.3 | 58.0 | −1.94 | 1.0E−07 |
| 213318_s_at | 589 | BAT3 | HLA-B associated transcript 3 | 1411.3 | 727.2 | −1.94 | <1.0E−07 |
| 201904_s_at | 590 | CTDSPL | carboxy-terminal domain, RNA polymerase II, polypeptide | 329.4 | 169.6 | −1.94 | 8.7E−05 |
| | | | A small phosphatase-like | | | | |
| 214146_s_at | 591 | PPBP | pro-platelet basic protein (chemokine (C—X—C motif) ligand | 2851.2 | 1468.0 | −1.94 | 9.6E−06 |
| | | | 7) | | | | |
| 216191_s_at | 592 | TCRA | T cell receptor alpha | 1196.0 | 615.3 | −1.94 | 7.7E−05 |
| 1559249_at | 593 | ATXN1 | Ataxin 1 | 286.0 | 147.0 | −1.95 | 1.5E−05 |
| 224823_at | 594 | MYLK | myosin, light polypeptide kinase | 413.2 | 211.9 | −1.95 | 1.7E−04 |
| 208627_s_at | 595 | YBX1 | Y box binding protein 1 | 748.0 | 383.0 | −1.95 | 6.7E−05 |
| 200661_at | 596 | PPGB | protective protein for beta-galactosidase (galactosialidosis) | 702.7 | 359.8 | −1.95 | 1.0E−07 |
| 1557910_at | 597 | HSPCB | heat shock 90 kDa protein 1, beta | 55.6 | 28.4 | −1.96 | 2.7E−04 |
| 208657_s_at | 598 | SEPT9 | septin 9 | 926.0 | 473.6 | −1.96 | <1.0E−07 |
| 202583_s_at | 599 | RANBP9 | RAN binding protein 9 | 87.7 | 44.8 | −1.96 | 1.7E−05 |
| 228170_at | 600 | OLIG1 | oligodendrocyte transcription factor 1 | 65.0 | 33.1 | −1.96 | 1.4E−03 |
| 201267_s_at | 601 | PSMC3 | proteasome (prosome, macropain) 26S subunit, ATPase, 3 | 129.7 | 66.1 | −1.96 | 4.1E−06 |
| 1554406_a_at | 602 | CLEC7A | C-type lectin domain family 7, member A | 176.2 | 89.7 | −1.96 | 3.8E−05 |
| 204115_at | 603 | GNG11 | guanine nucleotide binding protein (G protein), gamma 11 | 447.8 | 227.9 | −1.97 | 1.1E−04 |
| 214623_at | 604 | SHFM3P1 | split hand/foot malformation (ectrodactyly) type 3 | 197.2 | 100.3 | −1.97 | <1.0E−07 |
| | | | pseudogene 1 | | | | |
| 226188_at | 605 | HSPC159 | HSPC159 protein | 328.3 | 166.5 | −1.97 | 9.7E−05 |
| 225154_at | 606 | SYAP1 | synapse associated protein 1, SAP47 homolog (Drosophila) | 947.8 | 480.3 | −1.97 | 2.0E−07 |
| 223811_s_at | 607 | C7orf20 | chromosome 7 open reading frame 20 | 314.4 | 159.2 | −1.97 | 4.0E−07 |
| 221704_s_at | 608 | VPS37B | vacuolar protein sorting 37B (yeast) | 503.6 | 254.7 | −1.98 | <1.0E−07 |
| 212657_s_at | 609 | IL1RN | interleukin 1 receptor antagonist | 62.8 | 31.7 | −1.98 | 2.2E−04 |
| 214974_x_at | 610 | CXCL5 | chemokine (C—X—C motif) ligand 5 | 319.8 | 161.6 | −1.98 | 2.9E−05 |
| 206494_s_at | 611 | ITGA2B | integrin, alpha 2b | 58.7 | 29.6 | −1.98 | 1.8E−05 |
| 201417_at | 612 | SOX4 | SRY (sex determining region Y)-box 4 | 300.8 | 151.5 | −1.99 | 2.4E−05 |
| 205660_at | 613 | OASL | 2′-5′-oligoadenylate synthetase-like | 201.3 | 101.2 | −1.99 | 4.0E−04 |
| 202876_s_at | 614 | PBX2 | pre-B-cell leukemia transcription factor 2 | 385.1 | 193.4 | −1.99 | 3.0E−07 |
| 206445_s_at | 615 | HRMT1L2 | HMT1 hnRNP methyltransferase-like 2 (S. cerevisiae) | 694.8 | 348.8 | −1.99 | 5.0E−07 |
| 203561_at | 616 | FCGR2A | Fc fragment of IgG, low affinity IIa, receptor (CD32) | 129.8 | 65.1 | −1.99 | 3.3E−06 |
| 207460_at | 617 | GZMM | granzyme M (lymphocyte met-ase 1) | 287.9 | 143.8 | −2.00 | <1.0E−07 |
| 220494_s_at | 618 | | | 149.1 | 74.3 | −2.01 | 7.2E−03 |
| 202856_s_at | 619 | SLC16A3 | solute carrier family 16 (monocarboxylic acid transporters), | 135.3 | 67.4 | −2.01 | <1.0E−07 |
| | | | member 3 | | | | |
| 217356_s_at | 620 | PGK1 | phosphoglycerate kinase 1 | 135.0 | 67.3 | −2.01 | 1.2E−04 |
| 203045_at | 621 | NINJ1 | ninjurin 1 | 340.4 | 169.5 | −2.01 | <1.0E−07 |
| 213087_s_at | 622 | EEF1D | Eukaryotic translation elongation factor 1 delta | 63.1 | 31.4 | −2.01 | 8.1E−06 |
| 225354_s_at | 623 | SH3BGRL2 | SH3 domain binding glutamic acid-rich protein like 2 | 227.0 | 113.0 | −2.01 | 9.6E−05 |
| 227897_at | 624 | RAP2B | RAP2B, member of RAS oncogene family | 307.7 | 152.8 | −2.01 | 1.9E−05 |
| 238646_at | 625 | CLTC | Clathrin, heavy polypeptide (Hc) | 196.8 | 97.7 | −2.01 | 4.0E−07 |
| 202354_s_at | 626 | GTF2F1 | general transcription factor IIF, polypeptide 1, 74 kDa | 158.9 | 78.8 | −2.02 | 1.0E−07 |
| 237510_at | 627 | | | 336.9 | 167.0 | −2.02 | 2.0E−07 |
| 229441_at | 628 | PRSS23 | Protease, serine, 23 | 91.0 | 45.1 | −2.02 | <1.0E−07 |
| 204562_at | 629 | IRF4 | interferon regulatory factor 4 | 414.7 | 205.4 | −2.02 | 6.0E−07 |
| 242705_x_at | 630 | LRPAP1 | Low density lipoprotein receptor-related protein associated | 167.9 | 83.1 | −2.02 | <1.0E−07 |
| | | | protein 1 | | | | |
| 1553589_a_at | 631 | PDZK1IP1 | PDZK1 interacting protein 1 | 116.3 | 57.6 | −2.02 | 8.3E−03 |
| 212509_s_at | 632 | MXRA7 | matrix-remodelling associated 7 | 604.0 | 298.9 | −2.02 | <1.0E−07 |
| 223553_s_at | 633 | DOK3 | docking protein 3 | 211.4 | 104.6 | −2.02 | 4.3E−05 |
| 229733_s_at | 634 | CBX6 | Chromobox homolog 6 | 78.8 | 39.0 | −2.02 | 2.6E−03 |
| 220712_at | 635 | C8orf60 | chromosome 8 open reading frame 60 | 327.3 | 161.4 | −2.03 | <1.0E−07 |
| 212761_at | 636 | TCF7L2 | transcription factor 7-like 2 (T-cell specific, HMG-box) | 2472.6 | 1218.6 | −2.03 | <1.0E−07 |
| 238669_at | 637 | PTGS1 | prostaglandin-endoperoxide synthase 1 | 712.9 | 351.2 | −2.03 | 8.3E−06 |
| 213175_s_at | 638 | SNRPB | small nuclear ribonucleoprotein polypeptides B and B1 | 3194.1 | 1572.8 | −2.03 | 4.5E−06 |
| 205220_at | 639 | GPR109B | G protein-coupled receptor 109B | 75.0 | 36.9 | −2.03 | 2.1E−05 |
| 203139_at | 640 | DAPK1 | death-associated protein kinase 1 | 357.5 | 175.9 | −2.03 | 1.8E−06 |
| 203574_at | 641 | NFIL3 | nuclear factor, interleukin 3 regulated | 378.1 | 185.8 | −2.04 | 1.0E−07 |
| 219099_at | 642 | C12orf5 | chromosome 12 open reading frame 5 | 469.5 | 230.6 | −2.04 | <1.0E−07 |
| 204760_s_at | 643 | THRA | thyroid hormone receptor, alpha | 417.0 | 204.7 | −2.04 | <1.0E−07 |
| 224563_at | 644 | WASF2 | WAS protein family, member 2 | 95.2 | 46.7 | −2.04 | 2.0E−07 |
| 1562255_at | 645 | SYTL3 | synaptotagmin-like 3 | 184.4 | 90.3 | −2.04 | 1.1E−05 |
| 210785_s_at | 646 | C1orf38 | chromosome 1 open reading frame 38 | 398.8 | 195.2 | −2.04 | 8.0E−07 |
| 1554260_a_at | 647 | KIAA0826 | KIAA0826 | 83.5 | 40.8 | −2.05 | 1.0E−07 |
| 244470_at | 648 | RNF12 | Ring finger protein 12 | 1139.6 | 555.5 | −2.05 | 2.0E−07 |
| 1558719_s_at | 649 | C1QBP | Complement component 1, q subcomponent binding protein | 173.3 | 84.4 | −2.05 | 2.5E−06 |
| 228056_s_at | 650 | NAPSB | napsin B aspartic peptidase pseudogene | 343.4 | 167.2 | −2.05 | 2.0E−07 |
| 207314_x_at | 651 | KIR3DL2 | killer cell immunoglobulin-like receptor, three domains, long | 272.3 | 132.5 | −2.05 | 1.4E−06 |
| | | | cytoplasmic tail, 2 | | | | |
| 213418_at | 652 | HSPA6 | heat shock 70 kDa protein 6 (HSP70B′) | 345.8 | 168.1 | −2.06 | 5.3E−06 |
| 218895_at | 653 | GPATC3 | G patch domain containing 3 | 192.3 | 93.3 | −2.06 | <1.0E−07 |
| 211582_x_at | 654 | LST1 | leukocyte specific transcript 1 | 468.9 | 227.3 | −2.06 | 2.0E−07 |
| 202910_s_at | 655 | CD97 | CD97 antigen | 1457.3 | 705.2 | −2.07 | <1.0E−07 |
| 242832_at | 656 | PER1 | period homolog 1 (Drosophila) | 358.9 | 173.6 | −2.07 | <1.0E−07 |
| 223454_at | 657 | CXCL16 | chemokine (C—X—C motif) ligand 16 | 221.1 | 106.9 | −2.07 | 1.0E−07 |
| 221211_s_at | 658 | C21orf7 | chromosome 21 open reading frame 7 | 78.8 | 38.0 | −2.07 | 2.9E−04 |
| 202993_at | 659 | ILVBL | ilvB (bacterial acetolactate synthase)-like | 360.2 | 173.8 | −2.07 | 2.0E−07 |
| 200736_s_at | 660 | GPX1 | glutathione peroxidase 1 | 4595.0 | 2211.6 | −2.08 | 1.5E−05 |
| 225063_at | 661 | UBL7 | ubiquitin-like 7 (bone marrow stromal cell-derived) | 204.1 | 98.0 | −2.08 | <1.0E−07 |
| 217831_s_at | 662 | NSFL1C | NSFL1 (p97) cofactor (p47) | 125.3 | 60.2 | −2.08 | 1.0E−07 |
| 36829_at | 663 | PER1 | period homolog 1 (Drosophila) | 1374.7 | 659.2 | −2.09 | 3.0E−07 |
| 209651_at | 664 | TGFB1I1 | transforming growth factor beta 1 induced transcript 1 | 42.7 | 20.4 | −2.09 | <1.0E−07 |
| 217853_at | 665 | TENS1 | Tensin 3 | 243.3 | 116.5 | −2.09 | 4.5E−06 |
| 244546_at | 666 | CYCS | cytochrome c, somatic | 312.0 | 149.3 | −2.09 | 6.0E−07 |
| 222113_s_at | 667 | EPS15L1 | epidermal growth factor receptor pathway substrate 15-like 1 | 173.9 | 83.1 | −2.09 | <1.0E−07 |
| 220091_at | 668 | SLC2A6 | solute carrier family 2 (facilitated glucose transporter), | 256.1 | 122.3 | −2.09 | 1.0E−07 |
| | | | member 6 | | | | |
| 207111_at | 669 | EMR1 | egf-like module containing, mucin-like, hormone receptor- | 329.2 | 157.2 | −2.09 | 1.0E−07 |
| | | | like 1 | | | | |
| 227180_at | 670 | ELOVL7 | ELOVL family member 7, elongation of long chain fatty | 299.3 | 142.9 | −2.09 | 2.2E−05 |
| | | | acids (yeast) | | | | |
| 205821_at | 671 | KLRK1 | killer cell lectin-like receptor subfamily K, member 1 | 1120.3 | 534.5 | −2.10 | <1.0E−07 |
| 206390_x_at | 672 | PF4 | platelet factor 4 (chemokine (C—X—C motif) ligand 4) | 2309.3 | 1097.7 | −2.10 | 2.5E−06 |
| 201401_s_at | 673 | ADRBK1 | adrenergic, beta, receptor kinase 1 | 217.4 | 103.2 | −2.11 | <1.0E−07 |
| 212384_at | 674 | BAT1 | HLA-B associated transcript 1 | 824.0 | 390.6 | −2.11 | 2.0E−07 |
| 212041_at | 675 | ATP6V0D1 | ATPase, H+ transporting, lysosomal 38 kDa, V0 subunit d | 1045.3 | 495.5 | −2.11 | 5.4E−06 |
| | | | isoform 1 | | | | |
| 201137_s_at | 676 | HLA-DPB1 | major histocompatibility complex, class II, DP beta 1 | 1414.5 | 669.7 | −2.11 | 1.0E−07 |
| 208885_at | 677 | LCP1 | lymphocyte cytosolic protein 1 (L-plastin) | 423.0 | 200.3 | −2.11 | 1.2E−05 |
| 223368_s_at | 678 | AD-003 | AD-003 protein | 480.8 | 227.4 | −2.11 | <1.0E−07 |
| 239451_at | 679 | TRA1 | Tumor rejection antigen (gp96) 1 | 188.9 | 89.3 | −2.12 | 1.1E−05 |
| 202912_at | 680 | ADM | adrenomedullin | 193.5 | 91.5 | −2.12 | 2.3E−05 |
| 230833_at | 681 | ACRBP | acrosin binding protein | 144.4 | 68.2 | −2.12 | 9.2E−06 |
| 209774_x_at | 682 | CXCL2 | chemokine (C—X—C motif) ligand 2 | 36.0 | 17.0 | −2.12 | 1.1E−04 |
| 224703_at | 683 | WDR22 | WD repeat domain 22 | 393.2 | 185.5 | −2.12 | <1.0E−07 |
| 200878_at | 684 | EPAS1 | endothelial PAS domain protein 1 | 73.0 | 34.4 | −2.12 | <1.0E−07 |
| 227404_s_at | 685 | EGR1 | Early growth response 1 | 168.9 | 79.4 | −2.13 | 2.3E−04 |
| 1568870_at | 686 | | CDNA clone IMAGE: 5260228 | 93.9 | 44.1 | −2.13 | 2.0E−05 |
| 214574_x_at | 687 | LST1 | leukocyte specific transcript 1 | 562.1 | 264.0 | −2.13 | 1.0E−07 |
| 204852_s_at | 688 | PTPN7 | protein tyrosine phosphatase, non-receptor type 7 | 258.9 | 121.4 | −2.13 | <1.0E−07 |
| 204541_at | 689 | SEC14L2 | SEC14-like 2 (S. cerevisiae) | 107.3 | 50.3 | −2.13 | <1.0E−07 |
| 1569030_s_at | 690 | NYREN18 | NEDD8 ultimate buster-1 | 936.9 | 438.5 | −2.14 | <1.0E−07 |
| 212827_at | 691 | IGHM | immunoglobulin heavy constant mu | 523.7 | 245.1 | −2.14 | 2.2E−06 |
| 221712_s_at | 692 | WDR74 | WD repeat domain 74 /// WD repeat domain 74 | 531.5 | 248.6 | −2.14 | <1.0E−07 |
| 208579_x_at | 693 | H2BFS | H2B histone family, member S | 116.2 | 54.3 | −2.14 | <1.0E−07 |
| 204446_s_at | 694 | ALOX5 | arachidonate 5-lipoxygenase | 772.5 | 360.8 | −2.14 | <1.0E−07 |
| 221765_at | 695 | UGCG | UDP-glucose ceramide glucosyltransferase | 97.8 | 45.6 | −2.14 | 2.0E−07 |
| 208722_s_at | 696 | ANAPC5 | anaphase promoting complex subunit 5 | 760.5 | 353.9 | −2.15 | <1.0E−07 |
| 212975_at | 697 | DENND3 | DENN/MADD domain containing 3 | 541.1 | 251.8 | −2.15 | <1.0E−07 |
| 1557261_at | 698 | LOC339005 | hypothetical protein LOC339005 | 191.2 | 88.8 | −2.15 | 3.3E−05 |
| 38671_at | 699 | PLXND1 | plexin D1 | 765.1 | 355.2 | −2.15 | <1.0E−07 |
| 206881_s_at | 700 | LILRA3 | leukocyte immunoglobulin-like receptor, subfamily A, | 133.3 | 61.8 | −2.16 | 3.0E−07 |
| | | | member 3 | | | | |
| 223048_at | 701 | FLJ20487 | hypothetical protein FLJ20487 | 437.9 | 202.7 | −2.16 | <1.0E−07 |
| 233749_at | 702 | LOC442456 | similar to bA368D24A.1 (novel protein) | 93.8 | 43.2 | −2.17 | 1.0E−06 |
| 201245_s_at | 703 | OTUB1 | OTU domain, ubiquitin aldehyde binding 1 | 480.2 | 221.2 | −2.17 | 1.0E−07 |
| 228746_s_at | 704 | H41 | Hypothetical protein H41 | 84.6 | 39.0 | −2.17 | 3.6E−04 |
| 233177_s_at | 705 | MR-1 | myofibrillogenesis regulator 1 | 200.5 | 92.3 | −2.17 | 1.0E−07 |
| 230511_at | 706 | CREM | cAMP responsive element modulator | 1560.8 | 718.5 | −2.17 | 1.7E−06 |
| 1569346_a_at | 707 | P2RX1 | Purinergic receptor P2X, ligand-gated ion channel, 1 | 67.9 | 31.2 | −2.18 | <1.0E−07 |
| 222916_s_at | 708 | HDLBP | high density lipoprotein binding protein (vigilin) | 64.2 | 29.5 | −2.18 | <1.0E−07 |
| 209257_s_at | 709 | CSPG6 | chondroitin sulfate proteoglycan 6 (bamacan) | 116.4 | 53.5 | −2.18 | 8.0E−07 |
| 232627_at | 710 | HGS | Hepatocyte growth factor-regulated tyrosine kinase substrate | 246.2 | 113.1 | −2.18 | <1.0E−07 |
| 208792_s_at | 711 | CLU | clusterin | 390.9 | 179.5 | −2.18 | 5.8E−05 |
| 209020_at | 712 | C20orf111 | chromosome 20 open reading frame 111 | 1142.2 | 524.1 | −2.18 | <1.0E−07 |
| 218020_s_at | 713 | TEX27 | testis expressed sequence 27 | 230.5 | 105.7 | −2.18 | <1.0E−07 |
| 1555349_a_at | 714 | ITGB2 | integrin, beta 2 (antigen CD18) | 448.7 | 205.6 | −2.18 | 3.6E−06 |
| 226053_at | 715 | MAP2K7 | mitogen-activated protein kinase kinase 7 | 250.6 | 114.8 | −2.18 | <1.0E−07 |
| 1554423_a_at | 716 | FBXO7 | F-box protein 7 | 756.1 | 345.7 | −2.19 | <1.0E−07 |
| 202626_s_at | 717 | LYN | v-yes-1 Yamaguchi sarcoma viral related oncogene homolog | 1907.3 | 870.5 | −2.19 | <1.0E−07 |
| 204535_s_at | 718 | REST | RE1-silencing transcription factor | 212.9 | 97.0 | −2.19 | <1.0E−07 |
| 202301_s_at | 719 | FLJ11021 | similar to splicing factor, arginine/serine-rich 4 | 824.3 | 375.7 | −2.19 | <1.0E−07 |
| 211748_x_at | 720 | PTGDS | prostaglandin D2 synthase 21 kDa (brain) | 794.4 | 361.7 | −2.20 | <1.0E−07 |
| 202284_s_at | 721 | CDKN1A | cyclin-dependent kinase inhibitor 1A (p21, Cip1) | 513.0 | 233.6 | −2.20 | <1.0E−07 |
| 214181_x_at | 722 | LST1 | leukocyte specific transcript 1 | 503.1 | 229.0 | −2.20 | <1.0E−07 |
| 223369_at | 723 | AD-003 | AD-003 protein | 281.7 | 127.9 | −2.20 | <1.0E−07 |
| 200658_s_at | 724 | PHB | prohibitin | 404.2 | 183.4 | −2.20 | 3.0E−07 |
| 212695_at | 725 | CRY2 | cryptochrome 2 (photolyase-like) | 344.3 | 156.0 | −2.21 | <1.0E−07 |
| 203585_at | 726 | ZNF185 | zinc finger protein 185 (LIM domain) | 332.0 | 150.2 | −2.21 | 7.0E−07 |
| 230245_s_at | 727 | LOC283663 | hypothetical protein LOC283663 | 883.5 | 399.0 | −2.21 | 4.0E−07 |
| 201416_at | 728 | SOX4 | SRY (sex determining region Y)-box 4 | 1730.9 | 780.2 | −2.22 | <1.0E−07 |
| 201751_at | 729 | KIAA0063 | KIAA0063 gene product | 1852.9 | 833.3 | −2.22 | <1.0E−07 |
| 220532_s_at | 730 | LR8 | LR8 protein | 116.8 | 52.5 | −2.22 | 4.2E−03 |
| 209959_at | 731 | NR4A3 | nuclear receptor subfamily 4, group A, member 3 | 162.7 | 72.9 | −2.23 | 1.0E−07 |
| 213338_at | 732 | RIS1 | Ras-induced senescence 1 | 272.8 | 122.2 | −2.23 | 2.6E−05 |
| 36711_at | 733 | MAFF | v-maf musculoaponeurotic fibrosarcoma oncogene homolog F | 5920.0 | 2650.8 | −2.23 | <1.0E−07 |
| 220953_s_at | 734 | MTMR12 | myotubularin related protein 12 | 166.2 | 74.4 | −2.23 | <1.0E−07 |
| 212085_at | 735 | SLC25A6 | solute carrier family 25, member 6 | 4293.9 | 1921.3 | −2.23 | 1.2E−06 |
| 204103_at | 736 | CCL4 | chemokine (C-C motif) ligand 4 | 1023.7 | 457.6 | −2.24 | 1.0E−07 |
| 208690_s_at | 737 | PDLIM1 | PDZ and LIM domain 1 (elfin) | 1160.3 | 516.5 | −2.25 | <1.0E−07 |
| 206465_at | 738 | ACSBG1 | acyl-CoA synthetase bubblegum family member 1 | 64.7 | 28.7 | −2.25 | 9.0E−06 |
| 230690_at | 739 | TUBB1 | tubulin, beta 1 | 1947.5 | 865.4 | −2.25 | 1.5E−05 |
| 211654_x_at | 740 | HLA-DQB1 | major histocompatibility complex, class II, DQ beta 1 | 397.5 | 176.4 | −2.25 | 3.9E−06 |
| 226858_at | 741 | CSNK1E | Casein kinase 1, epsilon | 601.6 | 266.8 | −2.26 | <1.0E−07 |
| 207697_x_at | 742 | LILRB2 | leukocyte immunoglobulin-like receptor, subfamily B, | 137.1 | 60.6 | −2.26 | <1.0E−07 |
| | | | member 2 | | | | |
| 212025_s_at | 743 | FLII | flightless I homolog (Drosophila) | 98.3 | 43.4 | −2.26 | 1.0E−07 |
| 206486_at | 744 | LAG3 | lymphocyte-activation gene 3 | 110.9 | 48.9 | −2.26 | <1.0E−07 |
| 202068_s_at | 745 | LDLR | low density lipoprotein receptor (familial | 200.4 | 88.4 | −2.27 | <1.0E−07 |
| | | | hypercholesterolemia) | | | | |
| 201755_at | 746 | MCM5 | MCM5 minichromosome maintenance deficient 5, cell | 234.2 | 103.1 | −2.27 | <1.0E−07 |
| | | | division cycle 46 | | | | |
| 217591_at | 747 | SKIL | SKI-like | 1484.9 | 652.7 | −2.27 | <1.0E−07 |
| 209383_at | 748 | DDIT3 | DNA-damage-inducible transcript 3 | 339.9 | 149.3 | −2.28 | <1.0E−07 |
| 226011_at | 749 | CCDC12 | coiled-coil domain containing 12 | 1372.4 | 602.2 | −2.28 | <1.0E−07 |
| 205193_at | 750 | MAFF | v-maf musculoaponeurotic fibrosarcoma oncogene homolog F | 486.0 | 213.2 | −2.28 | <1.0E−07 |
| 213348_at | 751 | CDKN1C | Cyclin-dependent kinase inhibitor 1C (p57, Kip2) | 271.3 | 119.0 | −2.28 | 2.0E−07 |
| 211833_s_at | 752 | BAX | BCL2-associated X protein | 349.6 | 153.4 | −2.28 | 2.0E−07 |
| 205883_at | 753 | ZBTB16 | zinc finger and BTB domain containing 16 | 525.1 | 229.2 | −2.29 | <1.0E−07 |
| 202708_s_at | 754 | HIST2H2BE | histone 2, H2be | 746.8 | 325.6 | −2.29 | 6.6E−06 |
| 221432_s_at | 755 | SLC25A28 | solute carrier family 25, member 28 | 430.7 | 187.6 | −2.30 | 2.0E−07 |
| 215210_s_at | 756 | DLST | dihydrolipoamide S-succinyltransferase | 544.5 | 236.9 | −2.30 | <1.0E−07 |
| 208869_s_at | 757 | GABARAPL1 | GABA(A) receptor-associated protein like 1 | 514.8 | 224.0 | −2.30 | <1.0E−07 |
| 212002_at | 758 | C1orf144 | chromosome 1 open reading frame 144 | 759.2 | 330.3 | −2.30 | 1.8E−06 |
| 210046_s_at | 759 | IDH2 | isocitrate dehydrogenase 2 (NADP+), mitochondrial | 555.4 | 241.6 | −2.30 | <1.0E−07 |
| 212187_x_at | 760 | PTGDS | prostaglandin D2 synthase 21 kDa (brain) | 353.7 | 153.8 | −2.30 | <1.0E−07 |
| 224980_at | 761 | LEMD2 | LEM domain containing 2 | 120.6 | 52.4 | −2.30 | 5.1E−06 |
| 241133_at | 762 | | CDNA FLJ35984 fis, clone TESTI2014097 | 290.9 | 126.3 | −2.30 | 3.5E−06 |
| 1568768_s_at | 763 | BRE | brain and reproductive organ-expressed (TNFRSF1A | 336.0 | 145.9 | −2.30 | 3.0E−07 |
| | | | modulator) | | | | |
| 220248_x_at | 764 | NSFL1C | NSFL1 (p97) cofactor (p47) | 361.7 | 157.0 | −2.30 | <1.0E−07 |
| 1552807_a_at | 765 | SIGLEC10 | sialic acid binding Ig-like lectin 10 | 453.1 | 196.5 | −2.31 | <1.0E−07 |
| 230972_at | 766 | ANKRD9 | ankyrin repeat domain 9 | 209.4 | 90.7 | −2.31 | <1.0E−07 |
| 219529_at | 767 | CLIC3 | chloride intracellular channel 3 | 112.6 | 48.8 | −2.31 | 7.0E−07 |
| 201095_at | 768 | DAP | death-associated protein | 420.0 | 181.6 | −2.31 | <1.0E−07 |
| 202283_at | 769 | SERPINF1 | serpin peptidase inhibitor, clade F member 1 | 113.2 | 48.8 | −2.32 | <1.0E−07 |
| 228376_at | 770 | GGTA1 | Glycoprotein, alpha-galactosyltransferase 1 | 247.1 | 106.5 | −2.32 | 6.3E−06 |
| 238893_at | 771 | LOC338758 | hypothetical protein LOC338758 | 1714.0 | 737.6 | −2.32 | <1.0E−07 |
| 232311_at | 772 | B2M | Beta-2-microglobulin | 499.7 | 215.0 | −2.32 | <1.0E−07 |
| 220016_at | 773 | AHNAK | AHNAK nucleoprotein (desmoyokin) | 325.9 | 140.2 | −2.32 | <1.0E−07 |
| 243857_at | 774 | MORF4L2 | Mortality factor 4 like 2 | 86.4 | 37.1 | −2.33 | 7.0E−07 |
| 217362_x_at | 775 | HLA-DRB6 | major histocompatibility complex, class II, DR beta 6 | 456.3 | 195.8 | −2.33 | <1.0E−07 |
| | | | (pseudogene) | | | | |
| 227101_at | 776 | LOC168850 | hypothetical protein LOC168850 | 80.0 | 34.4 | −2.33 | <1.0E−07 |
| 204627_s_at | 777 | ITGB3 | integrin, beta 3 (platelet glycoprotein IIIa, antigen CD61) | 169.9 | 72.9 | −2.33 | 3.9E−06 |
| 204383_at | 778 | DGCR14 | DiGeorge syndrome critical region gene 14 | 149.3 | 64.0 | −2.33 | <1.0E−07 |
| 201204_s_at | 779 | RRBP1 | Ribosome binding protein 1 homolog 180 kDa (dog) | 197.8 | 84.8 | −2.33 | <1.0E−07 |
| 227799_at | 780 | MYO1G | myosin IG | 368.1 | 157.6 | −2.34 | 1.5E−05 |
| 204440_at | 781 | CD83 | CD83 antigen | 879.9 | 376.5 | −2.34 | <1.0E−07 |
| 213915_at | 782 | NKG7 | natural killer cell group 7 sequence | 3867.3 | 1653.3 | −2.34 | 1.0E−07 |
| 202982_s_at | 783 | ACOT2 | acyl-CoA thioesterase 2 | 392.7 | 167.3 | −2.35 | <1.0E−07 |
| 225954_s_at | 784 | MIDN | midnolin | 363.4 | 154.6 | −2.35 | <1.0E−07 |
| 222874_s_at | 785 | CLN8 | ceroid-lipofuscinosis, neuronal 8 | 115.8 | 49.3 | −2.35 | <1.0E−07 |
| 205936_s_at | 786 | HK3 | hexokinase 3 (white cell) | 508.7 | 216.3 | −2.35 | 1.6E−06 |
| 217763_s_at | 787 | RAB31 | RAB31, member RAS oncogene family | 326.1 | 138.6 | −2.35 | 1.6E−05 |
| 226389_s_at | 788 | RAPGEF1 | Rap guanine nucleotide exchange factor (GEF) 1 | 694.6 | 294.1 | −2.36 | <1.0E−07 |
| 218009_s_at | 789 | PRC1 | protein regulator of cytokinesis 1 | 324.6 | 137.1 | −2.37 | <1.0E−07 |
| 212581_x_at | 790 | GAPDH | glyceraldehyde-3-phosphate dehydrogenase | 7043.2 | 2969.8 | −2.37 | <1.0E−07 |
| 201028_s_at | 791 | CD99 | CD99 antigen | 651.2 | 274.5 | −2.37 | 4.0E−07 |
| 225173_at | 792 | ARHGAP18 | Rho GTPase activating protein 18 | 180.9 | 76.3 | −2.37 | <1.0E−07 |
| 227364_at | 793 | | | 276.5 | 116.4 | −2.38 | 4.0E−07 |
| 201118_at | 794 | PGD | phosphogluconate dehydrogenase | 160.0 | 67.2 | −2.38 | <1.0E−07 |
| 231727_s_at | 795 | AD023 | AD023 protein | 265.9 | 111.7 | −2.38 | <1.0E−07 |
| 207979_s_at | 796 | CD8B1 | CD8 antigen, beta polypeptide 1 (p37) | 796.9 | 334.6 | −2.38 | 8.0E−07 |
| 207815_at | 797 | PF4V1 | platelet factor 4 variant 1 | 194.0 | 81.4 | −2.38 | 7.1E−04 |
| 1555613_a_at | 798 | ZAP70 | zeta-chain (TCR) associated protein kinase 70 kDa | 883.4 | 370.5 | −2.38 | 1.7E−05 |
| 204838_s_at | 799 | MLH3 | mutL homolog 3 (E. coli) | 571.4 | 239.6 | −2.38 | 5.0E−07 |
| 32032_at | 800 | DGCR14 | DiGeorge syndrome critical region gene 14 | 505.9 | 212.1 | −2.39 | <1.0E−07 |
| 210321_at | 801 | GZMH | granzyme H (cathepsin G-like 2, protein h-CCPX) | 1997.6 | 836.8 | −2.39 | <1.0E−07 |
| 209949_at | 802 | NCF2 | neutrophil cytosolic factor 2 | 497.3 | 208.2 | −2.39 | 4.0E−07 |
| 208622_s_at | 803 | VIL2 | villin 2 (ezrin) | 1065.9 | 445.7 | −2.39 | <1.0E−07 |
| 235014_at | 804 | LOC147727 | hypothetical protein LOC147727 | 267.2 | 111.4 | −2.40 | <1.0E−07 |
| 211656_x_at | 805 | HLA-DQB1 | major histocompatibility complex, class II, DQ beta 1 | 410.8 | 169.8 | −2.42 | <1.0E−07 |
| 218280_x_at | 806 | HIST2H2AA | histone 2, H2aa | 689.1 | 284.5 | −2.42 | <1.0E−07 |
| 218454_at | 807 | FLJ22662 | hypothetical protein FLJ22662 | 739.1 | 305.2 | −2.42 | 1.4E−05 |
| 215092_s_at | 808 | NFAT5 | nuclear factor of activated T-cells 5 | 120.6 | 49.8 | −2.42 | <1.0E−07 |
| 222043_at | 809 | CLU | clusterin | 57.9 | 23.9 | −2.42 | 5.7E−06 |
| 204039_at | 810 | CEBPA | CCAAT/enhancer binding protein (C/EBP), alpha | 207.8 | 85.7 | −2.42 | <1.0E−07 |
| 230574_at | 811 | LOC388480 | hypothetical LOC388480 | 62.9 | 25.9 | −2.43 | 3.6E−06 |
| 225738_at | 812 | RAPGEF1 | Rap guanine nucleotide exchange factor (GEF) 1 | 1133.9 | 467.3 | −2.43 | <1.0E−07 |
| 211192_s_at | 813 | CD84 | CD84 antigen (leukocyte antigen) | 51.4 | 21.1 | −2.43 | <1.0E−07 |
| 209953_s_at | 814 | CDC37 | CDC37 cell division cycle 37 homolog (S. cerevisiae) | 191.5 | 78.8 | −2.43 | 1.4E−06 |
| 201465_s_at | 815 | JUN | v-jun sarcoma virus 17 oncogene homolog (avian) | 302.6 | 124.3 | −2.43 | 1.1E−06 |
| 201264_at | 816 | COPE | coatomer protein complex, subunit epsilon | 391.5 | 160.5 | −2.44 | <1.0E−07 |
| 200866_s_at | 817 | PSAP | prosaposin | 381.7 | 156.2 | −2.44 | <1.0E−07 |
| 207206_s_at | 818 | ALOX12 | arachidonate 12-lipoxygenase | 250.5 | 102.3 | −2.45 | 4.0E−06 |
| 217716_s_at | 819 | SEC61A1 | Sec61 alpha 1 subunit (S. cerevisiae) | 338.6 | 138.0 | −2.45 | 6.0E−07 |
| 218064_s_at | 820 | AKAP8L | A kinase (PRKA) anchor protein 8-like | 137.1 | 55.8 | −2.46 | 4.8E−06 |
| 202510_s_at | 821 | TNFAIP2 | tumor necrosis factor, alpha-induced protein 2 | 285.5 | 116.0 | −2.46 | 2.0E−07 |
| 200982_s_at | 822 | ANXA6 | annexin A6 | 404.7 | 163.7 | −2.47 | 1.0E−07 |
| 1555759_a_at | 823 | CCL5 | chemokine (C-C motif) ligand 5 | 2643.5 | 1067.3 | −2.48 | 3.0E−07 |
| 1555962_at | 824 | B3GNT7 | UDP-GlcNAc:betaGal beta-1,3-N- | 143.8 | 58.0 | −2.48 | <1.0E−07 |
| | | | acetylglucosaminyltransferase 7 | | | | |
| 208161_s_at | 825 | ABCC3 | ATP-binding cassette, sub-family C (CFTR/MRP), member 3 | 205.8 | 83.0 | −2.48 | <1.0E−07 |
| 206110_at | 826 | HIST1H3H | histone 1, H3h | 659.4 | 265.8 | −2.48 | 1.1E−05 |
| 208624_s_at | 827 | EIF4G1 | eukaryotic translation initiation factor 4 gamma, 1 | 242.3 | 97.4 | −2.49 | <1.0E−07 |
| 204890_s_at | 828 | LCK | lymphocyte-specific protein tyrosine kinase | 727.7 | 292.4 | −2.49 | 4.5E−06 |
| 234942_s_at | 829 | DNTTIP1 | deoxynucleotidyltransferase, terminal, interacting protein 1 | 122.9 | 49.2 | −2.50 | <1.0E−07 |
| 204588_s_at | 830 | SLC7A7 | solute carrier family 7 (cationic amino acid transporter, y+ | 951.0 | 380.4 | −2.50 | 9.0E−07 |
| | | | system), member 7 | | | | |
| 221748_s_at | 831 | TNS1 | tensin 1 /// tensin 1 | 109.7 | 43.9 | −2.50 | 1.0E−06 |
| 201340_s_at | 832 | ENC1 | ectodermal-neural cortex (with BTB-like domain) | 177.2 | 70.8 | −2.50 | 1.0E−07 |
| 204638_at | 833 | ACP5 | acid phosphatase 5, tartrate resistant | 369.5 | 147.3 | −2.51 | <1.0E−07 |
| 204971_at | 834 | CSTA | cystatin A (stefin A) | 751.1 | 298.9 | −2.51 | 3.2E−06 |
| 201195_s_at | 835 | SLC7A5 | solute carrier family 7 member 5 | 1028.5 | 409.0 | −2.51 | <1.0E−07 |
| 200665_s_at | 836 | SPARC | osteonectin | 1365.2 | 542.0 | −2.52 | 5.0E−07 |
| 218028_at | 837 | ELOVL1 | elongation of very long chain fatty acids (FEN1/Elo2, | 291.2 | 115.5 | −2.52 | <1.0E−07 |
| | | | SUR4/Elo3, yeast)-like 1 | | | | |
| 210895_s_at | 838 | CD86 | CD86 antigen (CD28 antigen ligand 2, B7-2 antigen) | 94.0 | 37.2 | −2.53 | 1.3E−06 |
| 213453_x_at | 839 | GAPDH | glyceraldehyde-3-phosphate dehydrogenase | 4683.0 | 1853.4 | −2.53 | <1.0E−07 |
| 212065_s_at | 840 | USP34 | ubiquitin specific peptidase 34 | 95.7 | 37.8 | −2.53 | <1.0E−07 |
| 203535_at | 841 | S100A9 | S100 calcium binding protein A9 (calgranulin B) | 603.6 | 238.3 | −2.53 | 2.2E−06 |
| 222670_s_at | 842 | MAFB | v-maf musculoaponeurotic fibrosarcoma oncogene homolog | 566.5 | 223.6 | −2.53 | 6.0E−07 |
| | | | B (avian) | | | | |
| 217078_s_at | 843 | CD300A | CD300A antigen | 59.3 | 23.4 | −2.54 | 1.0E−06 |
| 228284_at | 844 | TLE1 | transducin-like enhancer of split 1 | 246.7 | 97.1 | −2.54 | <1.0E−07 |
| 209160_at | 845 | AKR1C3 | aldo-keto reductase family 1, member C3 | 468.3 | 183.8 | −2.55 | <1.0E−07 |
| 205863_at | 846 | S100A12 | S100 calcium binding protein A12 (calgranulin C) | 188.5 | 74.0 | −2.55 | 7.1E−06 |
| 222218_s_at | 847 | PILRA | paired immunoglobin-like type 2 receptor alpha | 148.2 | 58.1 | −2.55 | <1.0E−07 |
| 215071_s_at | 848 | HIST1H2AC | histone 1, H2ac | 1220.5 | 478.0 | −2.55 | 1.1E−06 |
| 217398_x_at | 849 | GAPDH | glyceraldehyde-3-phosphate dehydrogenase | 4863.9 | 1901.0 | −2.56 | <1.0E−07 |
| 202481_at | 850 | DHRS3 | dehydrogenase/reductase (SDR family) member 3 | 581.6 | 227.2 | −2.56 | <1.0E−07 |
| 214469_at | 851 | HIST1H2AE | histone 1, H2ae | 112.7 | 43.9 | −2.57 | <1.0E−07 |
| 236213_at | 852 | NFE2L2 | Nuclear factor (erythroid-derived 2)-like 2 | 102.4 | 39.8 | −2.57 | <1.0E−07 |
| 202861_at | 853 | PER1 | period homolog 1 (Drosophila) | 1514.4 | 586.7 | −2.58 | 3.0E−07 |
| 223717_s_at | 854 | ACRBP | acrosin binding protein | 846.7 | 327.8 | −2.58 | 1.8E−06 |
| 201422_at | 855 | IFI30 | interferon, gamma-inducible protein 30 | 3272.5 | 1265.0 | −2.59 | 9.0E−07 |
| 220088_at | 856 | C5R1 | complement component 5 receptor 1 (C5a ligand) | 132.8 | 51.3 | −2.59 | <1.0E−07 |
| 202241_at | 857 | TRIB1 | tribbles homolog 1 (Drosophila) | 277.4 | 107.0 | −2.59 | <1.0E−07 |
| 201110_s_at | 858 | THBS1 | thrombospondin 1 | 62.8 | 24.1 | −2.61 | 2.3E−05 |
| 207075_at | 859 | CIAS1 | cold autoinflammatory syndrome 1 | 284.6 | 109.0 | −2.61 | <1.0E−07 |
| 204419_x_at | 860 | HBG1 | hemoglobin, gamma A | 119.9 | 45.9 | −2.61 | 4.1E−03 |
| 205442_at | 861 | MFAP3L | microfibrillar-associated protein 3-like | 159.5 | 60.8 | −2.62 | 1.5E−06 |
| 203305_at | 862 | F13A1 | coagulation factor XIII, A1 polypeptide | 823.4 | 312.3 | −2.64 | 8.0E−07 |
| 208887_at | 863 | EIF3S4 | eukaryotic translation initiation factor 3, subunit 4 delta, | 3452.5 | 1308.1 | −2.64 | <1.0E−07 |
| | | | 44 kDa | | | | |
| 208699_x_at | 864 | TKT | transketolase (Wernicke-Korsakoff syndrome) | 155.1 | 58.6 | −2.65 | <1.0E−07 |
| 203821_at | 865 | HBEGF | heparin-binding EGF-like growth factor | 207.6 | 78.3 | −2.65 | 7.0E−07 |
| 225955_at | 866 | METRNL | meteorin, glial cell differentiation regulator-like | 497.4 | 187.3 | −2.66 | <1.0E−07 |
| 208890_s_at | 867 | PLXNB2 | plexin B2 | 178.9 | 67.1 | −2.67 | <1.0E−07 |
| 220751_s_at | 868 | C5orf4 | chromosome 5 open reading frame 4 | 200.0 | 75.0 | −2.67 | <1.0E−07 |
| 242778_at | 869 | LPXN | leupaxin | 128.2 | 48.0 | −2.67 | <1.0E−07 |
| 210423_s_at | 870 | SLC11A1 | solute carrier family 11, member 1 | 267.4 | 100.2 | −2.67 | <1.0E−07 |
| 223809_at | 871 | RGS18 | regulator of G-protein signalling 18 | 841.3 | 314.8 | −2.67 | 1.0E−07 |
| 210613_s_at | 872 | SYNGR1 | synaptogyrin 1 | 221.1 | 82.7 | −2.67 | <1.0E−07 |
| 208791_at | 873 | CLU | clusterin | 199.9 | 74.7 | −2.68 | 1.5E−06 |
| 204088_at | 874 | P2RX4 | purinergic receptor P2X, ligand-gated ion channel, 4 | 190.0 | 71.0 | −2.68 | <1.0E−07 |
| 211991_s_at | 875 | HLA-DPA1 | major histocompatibility complex, class II, DP alpha 1 | 438.5 | 163.5 | −2.68 | <1.0E−07 |
| 228834_at | 876 | TOB1 | transducer of ERBB2, 1 | 277.5 | 103.4 | −2.68 | 4.5E−05 |
| 208092_s_at | 877 | FAM49A | family with sequence similarity 49, member A | 160.5 | 59.6 | −2.69 | <1.0E−07 |
| 219630_at | 878 | PDZK1IP1 | PDZK1 interacting protein 1 | 141.7 | 52.3 | −2.71 | 7.6E−04 |
| 214450_at | 879 | CTSW | cathepsin W (lymphopain) | 2011.5 | 742.2 | −2.71 | <1.0E−07 |
| 212722_s_at | 880 | PTDSR | phosphatidylserine receptor | 773.2 | 284.7 | −2.72 | <1.0E−07 |
| 242020_s_at | 881 | ZBP1 | Z-DNA binding protein 1 | 214.3 | 78.9 | −2.72 | <1.0E−07 |
| 208325_s_at | 882 | AKAP13 | A kinase (PRKA) anchor protein 13 | 140.6 | 51.6 | −2.73 | <1.0E−07 |
| 202555_s_at | 883 | MYLK | myosin, light polypeptide kinase /// myosin, light | 187.9 | 68.8 | −2.73 | 3.0E−07 |
| | | | polypeptide kinase | | | | |
| 226843_s_at | 884 | PAPD5 | PAP associated domain containing 5 | 1944.0 | 710.6 | −2.74 | <1.0E−07 |
| 242701_at | 885 | TBRG1 | Transforming growth factor beta regulator 1 | 102.6 | 37.1 | −2.77 | <1.0E−07 |
| 213872_at | 886 | C6orf62 | Chromosome 6 open reading frame 62 | 94.5 | 34.1 | −2.77 | 2.5E−05 |
| 231262_at | 887 | | Transcribed locus | 286.3 | 103.3 | −2.77 | <1.0E−07 |
| 230348_at | 888 | LATS2 | LATS, large tumor suppressor, homolog 2 (Drosophila) | 85.7 | 30.7 | −2.79 | <1.0E−07 |
| 206655_s_at | 889 | GP1BB | glycoprotein Ib (platelet), beta polypeptide | 242.9 | 86.6 | −2.80 | 4.0E−07 |
| 210754_s_at | 890 | LYN | v-yes-1 Yamaguchi sarcoma viral related oncogene homolog | 515.6 | 183.7 | −2.81 | <1.0E−07 |
| 211026_s_at | 891 | MGLL | monoglyceride lipase /// monoglyceride lipase | 252.4 | 89.5 | −2.82 | <1.0E−07 |
| 204670_x_at | 892 | HLA-DRB1 | major histocompatibility complex, class II, DR beta 1 | 4251.4 | 1499.2 | −2.84 | <1.0E−07 |
| 204187_at | 893 | GMPR | guanosine monophosphate reductase | 223.7 | 78.8 | −2.84 | 1.6E−06 |
| 212998_x_at | 894 | HLA-DQB1 | major histocompatibility complex, class II, DQ beta 1 | 365.2 | 128.1 | −2.85 | <1.0E−07 |
| 1555963_x_at | 895 | B3GNT7 | UDP-GlcNAc:betaGal beta-1,3-N- | 134.2 | 46.9 | −2.86 | <1.0E−07 |
| | | | acetylglucosaminyltransferase 7 | | | | |
| 214290_s_at | 896 | HIST2H2AA | histone 2, H2aa | 450.1 | 157.3 | −2.86 | <1.0E−07 |
| 208306_x_at | 897 | HLA-DRB5 | Major histocompatibility complex, class II, DR beta 3 | 4781.7 | 1656.4 | −2.89 | <1.0E−07 |
| 231484_at | 898 | ATP8A1 | ATPase, aminophospholipid transporter (APLT), Class I, | 543.5 | 188.0 | −2.89 | 4.8E−05 |
| | | | type 8A, member 1 | | | | |
| 207535_s_at | 899 | NFKB2 | nuclear factor of kappa light polypeptide gene enhancer in | 531.0 | 183.6 | −2.89 | 1.0E−07 |
| | | | B-cells 2 (p49/p100) | | | | |
| 204122_at | 900 | TYROBP | TYRO protein tyrosine kinase binding protein | 1294.3 | 447.0 | −2.90 | <1.0E−07 |
| 235751_s_at | 901 | LOC284013 | secretory protein LOC284013 | 97.6 | 33.7 | −2.90 | 1.0E−05 |
| 222439_s_at | 902 | THRAP3 | thyroid hormone receptor associated protein 3 | 2016.2 | 694.5 | −2.90 | <1.0E−07 |
| 238545_at | 903 | BRD7 | Bromodomain containing 7 | 1166.4 | 399.7 | −2.92 | <1.0E−07 |
| 208018_s_at | 904 | HCK | hemopoietic cell kinase | 206.2 | 69.7 | −2.96 | <1.0E−07 |
| 213787_s_at | 905 | EBP | emopamil binding protein (sterol isomerase) | 612.1 | 206.6 | −2.96 | <1.0E−07 |
| 217234_s_at | 906 | VIL2 | villin 2 (ezrin) | 346.4 | 116.3 | −2.98 | <1.0E−07 |
| 214349_at | 907 | | Hypothetical LOC388388 | 856.3 | 286.9 | −2.98 | <1.0E−07 |
| 224836_at | 908 | TP53INP2 | tumor protein p53 inducible nuclear protein 2 | 323.3 | 108.0 | −2.99 | <1.0E−07 |
| 1556545_at | 909 | | CDNA FLJ32379 fis, clone SKMUS1000030 | 1248.0 | 414.9 | −3.01 | <1.0E−07 |
| 232392_at | 910 | SFRS3 | Splicing factor, arginine/serine-rich 3 | 449.4 | 149.3 | −3.01 | 1.7E−06 |
| 205767_at | 911 | EREG | epiregulin | 79.3 | 26.3 | −3.02 | 1.0E−07 |
| 31874_at | 912 | GAS2L1 | growth arrest-specific 2 like 1 | 161.2 | 53.4 | −3.02 | <1.0E−07 |
| 205114_s_at | 913 | CCL3 | chemokine (C-C motif) ligand 3 | 555.1 | 183.5 | −3.03 | <1.0E−07 |
| 201743_at | 914 | CD14 | CD14 antigen /// CD14 antigen | 199.0 | 65.6 | −3.03 | 2.0E−07 |
| 1553043_a_at | 915 | CD300LF | CD300 antigen like family member F | 264.8 | 87.0 | −3.04 | <1.0E−07 |
| 219434_at | 916 | TREM1 | triggering receptor expressed on myeloid cells 1 | 113.4 | 37.3 | −3.04 | <1.0E−07 |
| 201125_s_at | 917 | ITGB5 | integrin, beta 5 | 494.5 | 162.4 | −3.04 | <1.0E−07 |
| 211429_s_at | 918 | SERPINA1 | serpin peptidase inhibitor, clade A, member 1 | 560.5 | 182.9 | −3.06 | 2.0E−07 |
| 205067_at | 919 | IL1B | interleukin 1, beta | 135.8 | 44.2 | −3.08 | <1.0E−07 |
| 236439_at | 920 | BCL6 | B-cell CLL/lymphoma 6 (zinc finger protein 51) | 99.6 | 32.4 | −3.08 | 4.2E−05 |
| 204614_at | 921 | SERPINB2 | serpin peptidase inhibitor, clade B (ovalbumin), member 2 | 42.6 | 13.7 | −3.11 | 1.0E−06 |
| 210982_s_at | 922 | HLA-DRA | major histocompatibility complex, class II, DR alpha | 409.7 | 130.6 | −3.14 | <1.0E−07 |
| 1555659_a_at | 923 | TREML1 | triggering receptor expressed on myeloid cells-like 1 | 181.4 | 56.7 | −3.20 | <1.0E−07 |
| 221698_s_at | 924 | CLEC7A | C-type lectin domain family 7, member A | 186.8 | 57.5 | −3.25 | <1.0E−07 |
| 209823_x_at | 925 | HLA-DQB1 | major histocompatibility complex, class II, DQ beta 1 | 292.3 | 89.9 | −3.25 | <1.0E−07 |
| 202545_at | 926 | PRKCD | protein kinase C, delta | 194.4 | 59.7 | −3.26 | <1.0E−07 |
| 203665_at | 927 | HMOX1 | heme oxygenase (decycling) 1 | 252.5 | 77.5 | −3.26 | <1.0E−07 |
| 241889_at | 928 | TA-NFKBH | T-cell activation NFKB-like protein | 84.1 | 25.8 | −3.26 | <1.0E−07 |
| 206877_at | 929 | MXD1 | MAX dimerization protein 1 | 79.8 | 24.5 | −3.26 | <1.0E−07 |
| 202672_s_at | 930 | ATF3 | activating transcription factor 3 | 525.2 | 160.7 | −3.27 | <1.0E−07 |
| 1566403_at | 931 | RNU68 | RNA, U68 small nucleolar | 122.7 | 37.4 | −3.28 | <1.0E−07 |
| 224568_x_at | 932 | MALAT1 | metastasis associated lung adenocarcinoma transcript 1 (non- | 270.3 | 81.5 | −3.32 | <1.0E−07 |
| | | | coding RNA) | | | | |
| 235102_x_at | 933 | GRAP | GRB2-related adaptor protein-like | 978.0 | 293.2 | −3.34 | <1.0E−07 |
| 230942_at | 934 | CKLFSF5 | chemokine-like factor superfamily 5 | 164.4 | 48.9 | −3.36 | <1.0E−07 |
| 208930_s_at | 935 | ILF3 | interleukin enhancer binding factor 3, 90 kDa | 1377.8 | 408.8 | −3.37 | <1.0E−07 |
| 230333_at | 936 | SAT | Spermidine/spermine N1-acetyltransferase | 244.7 | 72.1 | −3.39 | 9.5E−06 |
| 202083_s_at | 937 | SEC14L1 | SEC14-like 1 (S. cerevisiae) | 370.4 | 107.9 | −3.43 | <1.0E−07 |
| 210387_at | 938 | HIST1H2BG | histone 1, H2bg | 226.8 | 65.9 | −3.44 | <1.0E−07 |
| 228055_at | 939 | NAPSB | napsin B aspartic peptidase pseudogene | 457.9 | 133.0 | −3.44 | <1.0E−07 |
| 218559_s_at | 940 | MAFB | v-maf musculoaponeurotic fibrosarcoma oncogene homolog | 725.8 | 210.8 | −3.44 | <1.0E−07 |
| | | | B (avian) | | | | |
| 209398_at | 941 | HIST1H1C | histone 1, H1c | 217.1 | 62.8 | −3.45 | <1.0E−07 |
| 210512_s_at | 942 | VEGF | vascular endothelial growth factor | 56.8 | 16.2 | −3.50 | <1.0E−07 |
| 222760_at | 943 | ZNF703 | zinc finger protein 703 | 182.3 | 51.4 | −3.55 | <1.0E−07 |
| 217878_s_at | 944 | CDC27 | cell division cycle 27 | 236.9 | 66.7 | −3.55 | <1.0E−07 |
| 205382_s_at | 945 | DF | D component of complement (adipsin) | 475.4 | 133.8 | −3.55 | <1.0E−07 |
| 208894_at | 946 | HLA-DRA | major histocompatibility complex, class II, DR alpha | 696.7 | 196.0 | −3.56 | <1.0E−07 |
| 214073_at | 947 | CTTN | cortactin | 128.5 | 35.7 | −3.60 | <1.0E−07 |
| 235086_at | 948 | THBS1 | Thrombospondin 1 | 169.1 | 46.6 | −3.63 | 1.5E−06 |
| 202859_x_at | 949 | IL8 | interleukin 8 | 831.7 | 229.3 | −3.63 | <1.0E−07 |
| 238013_at | 950 | PLEKHA2 | pleckstrin homology domain containing, family A member 2 | 560.9 | 151.6 | −3.70 | <1.0E−07 |
| 202833_s_at | 951 | SERPINA1 | serpin peptidase inhibitor, clade A, member 1 | 125.4 | 32.2 | −3.89 | 2.0E−07 |
| 209312_x_at | 952 | HLA-DRB1 | major histocompatibility complex, class II, DR beta 1 | 4733.8 | 1216.4 | −3.89 | <1.0E−07 |
| 205237_at | 953 | FCN1 | ficolin (collagen/fibrinogen domain containing) 1 | 1909.9 | 482.9 | −3.95 | <1.0E−07 |
| 211924_s_at | 954 | PLAUR | plasminogen activator, urokinase receptor | 185.6 | 46.5 | −3.99 | <1.0E−07 |
| 204748_at | 955 | PTGS2 | prostaglandin-endoperoxide synthase 2 | 95.0 | 23.5 | −4.05 | 1.6E−06 |
| 215193_x_at | 956 | HLA-DRB1 | major histocompatibility complex, class II, DR beta 1 | 1861.9 | 455.5 | −4.09 | <1.0E−07 |
| 201101_s_at | 957 | BCLAF1 | BCL2-associated transcription factor 1 | 1195.1 | 286.5 | −4.17 | <1.0E−07 |
| 213446_s_at | 958 | IQGAP1 | IQ motif containing GTPase activating protein 1 | 278.3 | 66.4 | −4.19 | <1.0E−07 |
| 212671_s_at | 959 | HLA-DQA1 | major histocompatibility complex, class II, DQ alpha | 725.1 | 168.4 | −4.31 | 7.2E−05 |
| 210845_s_at | 960 | PLAUR | plasminogen activator, urokinase receptor | 344.1 | 79.4 | −4.33 | <1.0E−07 |
| 201360_at | 961 | CST3 | cystatin C (amyloid angiopathy and cerebral hemorrhage) | 610.2 | 136.3 | −4.48 | <1.0E−07 |
| 228986_at | 962 | OSBPL8 | oxysterol binding protein-like 8 | 347.4 | 73.4 | −4.74 | <1.0E−07 |
| 213515_x_at | 963 | HBG | hemoglobin, gamma A | 284.1 | 57.4 | −4.95 | 1.1E−03 |
| 213524_s_at | 964 | G0S2 | G0/G1switch 2 | 442.2 | 87.4 | −5.06 | <1.0E−07 |
| 208621_s_at | 965 | VIL2 | villin 2 (ezrin) | 334.2 | 52.7 | −6.34 | <1.0E−07 |
| 204018_x_at | 966 | HBA1 | hemoglobin, alpha 1 | 571.7 | 80.7 | −7.08 | <1.0E−07 |
| 211699_x_at | 967 | HBA1 | hemoglobin, alpha 1 | 574.4 | 80.7 | −7.12 | <1.0E−07 |
| 217414_x_at | 968 | HBA2 | hemoglobin, alpha 2 | 568.5 | 63.7 | −8.92 | <1.0E−07 |
| 242918_at | 969 | NASP | Nuclear autoantigenic sperm protein (histone-binding) | 122.7 | 12.0 | −10.27 | <1.0E−07 |
| 217232_x_at | 970 | HBB | hemoglobin, beta | 1881.8 | 176.7 | −10.65 | <1.0E−07 |
| 209458_x_at | 971 | HBA1 | hemoglobin, alpha 1 | 860.4 | 74.5 | −11.55 | <1.0E−07 |
| 211696_x_at | 972 | HBB | hemoglobin, beta | 2246.6 | 189.6 | −11.85 | <1.0E−07 |
| 211745_x_at | 973 | HBA1 | hemoglobin, alpha 1 | 985.4 | 78.9 | −12.50 | <1.0E−07 |
| 209116_x_at | 974 | HBB | hemoglobin, beta | 1821.4 | 98.9 | −18.41 | <1.0E−07 |
| 214414_x_at | 975 | HBA2 | hemoglobin, alpha 2 | 1686.7 | 87.5 | −19.27 | <1.0E−07 |

TABLE 6

| | Probe set | SEQ ID | | | Ratio (Grp1/ | |
|---|---|---|---|---|---|---|
| Order | Identifier | NO: | Marker Gene | Gene Description | other CIS) | p-value |
| 1 | 217800_s_at | 2 | NDFIP1 | Nedd4 family interacting protein 1 | 3.8 | <1e−07 |
| 2 | 225247_at | 298 | C19orf6 | Chromosome 19 open reading frame 6 | 3.1 | 1.E−05 |
| 3 | 213915_at | 782 | NKG7 | Natural killer cell group 7 sequence | 2.9 | <1e−07 |
| 4 | 200041_s_at | 981 | BAT1 | HLA-B associated transcript 1 | 2.5 | <1e−07 |
| 5 | 211716_x_at | 1000 | ARHGDIA | Rho GDP dissociation inhibitor (GDI) alpha | 2.5 | <1e−07 |
| 6 | 233350_s_at | 300 | TEX264 | Testis expressed sequence 264 | 2.4 | 1.E−06 |
| 7 | 219529_at | 767 | CLIC3 | Chloride intracellular channel 3 | 2.4 | <1e−07 |
| 8 | 218607_s_at | 116 | SDAD1 | SDA1 domain containing 1 | 2.3 | <1e−07 |
| 9 | 202652_at | 290 | APBB1 | Amyloid beta (A4) precursor protein-binding, family B, | 2.3 | 9.E−06 |
| | | | | member 1 | | |
| 10 | 216520_s_at | 138 | TPT1 | Tumor protein, translationally-controlled 1 | 2.3 | <1e−07 |
| 11 | 1554021 a_at | 83 | ZNF12 | Zinc finger protein 12 | 2.2 | <1e−07 |
| 12 | 204122_at | 900 | TYROBP | TYRO protein tyrosine kinase binding protein | 2.2 | <1e−07 |
| 13 | 219878_s_at | 504 | KLF13 | Kruppel-like factor 13 | 2.2 | <1e−07 |
| 14 | 216231_s_at | 242 | B2M | Beta-2-microglobulin | 2.2 | 2.E−07 |
| 15 | 219571_s_at | 106 | ZNF12 | Zinc finger protein 12 | 2.1 | <1e−07 |
| 16 | 214450_at | 879 | CTSW | Cathepsin W (lymphopain) | 2.1 | <1e−07 |
| 17 | 209050_s_at | 997 | RALGDS | Ral guanine nucleotide dissociation stimulator | 2.0 | <1e−07 |
| 18 | 207088_s_at | 992 | SLC25A11 | Solute carrier family 25, member 11 | 1.9 | <1e−07 |
| 19 | 1558215_s_at | 71 | UBTF | Upstream binding transcription factor, RNA polymerase I | 1.9 | <1e−07 |
| 20 | 200612_s_at | 982 | AP2B1 | Adaptor-related protein complex 2, beta 1 subunit | 1.9 | <1e−07 |
| 21 | 227266_s_at | 257 | FYB | FYN binding protein (FYB-120/130) | 1.9 | <1e−07 |
| 22 | 205480_s_at | 251 | UGP2 | UDP-glucose pyrophosphorylase 2 | 1.8 | <1e−07 |
| 23 | 201831_s_at | 213 | VDP | Vesicle docking protein p115 | 1.8 | 2.E−06 |
| 24 | 232535_at | 102 | | DKFZp434L201 | 1.8 | 1.E−07 |
| 25 | 244042_x_at | 269 | | Transcribed locus | 1.8 | 1.E−05 |
| 26 | 233713_at | 88 | SMYD2 | SET and MYND domain containing 2 | 1.8 | <1e−07 |
| 27 | 211947_s_at | 1001 | BAT2D1 | BAT2 domain containing 1 | 1.8 | <1e−07 |
| 28 | 212368_at | 152 | ZNF292 | Zinc finger protein 292 | 1.7 | <1e−07 |
| 29 | 217854_s_at | 573 | POLR2E | Polymerase (RNA) II (DNA directed) polypeptide E, 25 kDa | 1.7 | <1e−07 |
| 30 | 217993_s_at | 96 | MAT2B | Methionine adenosyltransferase II, beta | 1.7 | <1e−07 |
| 31 | 236562_at | 154 | ZNF439 | Zinc finger protein 439 | 1.6 | <1e−07 |
| 32 | 200033_at | 217 | DDX5 | DEAD (Asp-Glu-Ala-Asp) box polypeptide 5 | 1.6 | 1.E−07 |
| 33 | 221895_at | 225 | MOSPD2 | Motile sperm domain containing 2 | 1.6 | 8.E−07 |
| 34 | 201998_at | 987 | ST6GAL1 | ST6 beta-galactosamide alpha-2,6-sialyltranferase 1 | 1.6 | 1.E−07 |
| 35 | 209458_x_at | 971 | HBA1 /// HBA2 | Hemoglobin, alpha 1 /// alpha 2 | 1.6 | <1e−07 |
| 36 | 241838_at | 40 | | Transcribed locus | 1.5 | <1e−07 |
| 37 | 212540_at | 553 | CDC34 | Cell division cycle 34 | 1.5 | <1e−07 |
| 38 | 212926_at | 164 | SMC5L1 | SMC5 structural maintenance of chromosomes 5-like 1 | 1.5 | <1e−07 |
| 39 | 202283_at | 769 | SERPINF1 | Serpin peptidase inhibitor, clade F, member 1 | 1.5 | <1e−07 |
| 40 | 200735_x_at | 220 | NACA | Nascent-polypeptide-associated complex alpha polypeptide | 1.5 | <1e−07 |
| 41 | 207460_at | 617 | GZMM | Granzyme M (lymphocyte met-ase 1) | 1.5 | <1e−07 |
| 42 | 211699_x_at | 967 | HBA1 /// HBA2 | Hemoglobin, alpha 1 /// alpha 2 | 1.5 | <1e−07 |
| 43 | 208635_x_at | 214 | NACA | Nascent-polypeptide-associated complex alpha polypeptide | 1.5 | <1e−07 |
| 44 | 209651_at | 664 | TGFB1I1 | Transforming growth factor beta 1 induced transcript 1 | 1.5 | <1e−07 |
| 45 | 213687_s_at | 165 | RPL35A | Ribosomal protein L35a | 1.5 | <1e−07 |
| 46 | 208325_s_at | 882 | AKAP13 | A kinase (PRKA) anchor protein 13 | 1.5 | <1e−07 |
| 47 | 203375_s_at | 988 | TPP2 | Tripeptidyl peptidase II | 1.4 | 2.E−07 |
| 48 | 212063_at | 275 | CD44 | CD44 antigen | 1.4 | 3.E−07 |
| 49 | 235213_at | 76 | ITPKB | Inositol 1,4,5-trisphosphate 3-kinase B | 1.4 | <1e−07 |
| 50 | 242778_at | 869 | LPXN | Leupaxin | 0.8 | <1e−07 |
| 51 | 226843_s_at | 884 | PAPD5 | PAP associated domain containing 5 | 0.7 | <1e−07 |
| 52 | 1569599_at | 578 | SAMSN1 | SAM domain, SH3 domain and nuclear localisation signals, 1 | 0.7 | 4.E−05 |
| 53 | 207111_at | 669 | EMR1 | EGF-like module containing, mucin-like, hormone receptor- | 0.7 | <1e−07 |
| | | | | like 1 | | |
| 54 | 242918_at | 969 | NASP | Nuclear autoantigenic sperm protein (histone-binding) | 0.7 | <1e−07 |
| 55 | 1553861_at | 976 | TCP11L2 | T-complex 11 (mouse) like 2 | 0.7 | 2.E−05 |
| 56 | 1552807 a_at | 765 | SIGLEC10 | Sialic acid binding Ig-like lectin 10 | 0.6 | <1e−07 |
| 57 | 238545_at | 903 | BRD7 | Bromodomain containing 7 | 0.6 | <1e−07 |
| 58 | 202381_at | 433 | ADAM9 | ADAM metallopeptidase domain 9 (meltrin gamma) | 0.6 | 1.E−05 |
| 59 | 226982_at | 353 | ELL2 | Elongation factor, RNA polymerase II, 2 | 0.6 | 3.E−04 |
| 60 | 202083_s_at | 937 | SEC14L1 | SEC14-like 1 (S. cerevisiae) | 0.6 | <1e−07 |
| 61 | 228284_at | 844 | TLE1 | Transducin-like enhancer of split 1 | 0.6 | <1e−07 |
| 62 | 222670_s_at | 842 | MAFB | v-maf musculoaponeurotic fibrosarcoma oncogene homolog | 0.6 | <1e−07 |
| | | | | B | | |
| 63 | 243296_at | 396 | PBEF1 | Pre-B-cell colony enhancing factor 1 | 0.6 | 3.E−04 |
| 64 | 212840_at | 104 | KIAA0794 | KIAA0794 protein | 0.6 | <1e−07 |
| 65 | 1564164_at | 11 | FLJ20054 | Hypothetical protein FLJ20054 | 0.6 | <1e−07 |
| 66 | 204566_at | 990 | PPM1D | Protein phosphatase 1D magnesium-dependent, delta isoform | 0.6 | 4.E−06 |
| 67 | 226643_s_at | 184 | LOC134492 | NudC domain containing 2 | 0.6 | <1e−07 |
| 68 | 228049_x_at | 420 | | Transcribed locus | 0.6 | <1e−07 |
| 69 | 217602_at | 1010 | PPIA | Peptidylprolyl isomerase A (cyclophilin A) | 0.5 | 8.E−06 |
| 70 | 215023_s_at | 530 | PEX1 | Peroxisome biogenesis factor 1 | 0.5 | 6.E−07 |
| 71 | 1567213_at | 980 | PNN | Pinin, desmosome associated protein | 0.5 | <1e−07 |
| 72 | 209160_at | 845 | AKR1C3 | Aldo-keto reductase family 1, member C3 | 0.5 | <1e−07 |
| 73 | 205789_at | 376 | CD1D | CD1D antigen, d polypeptide | 0.5 | 5.E−04 |
| 74 | 208750_s_at | 430 | ARF1 | ADP-ribosylation factor 1 | 0.5 | 3.E−05 |
| 75 | 201151_s_at | 983 | MBNL1 | muscleblind-like (Drosophila) | 0.5 | <1e−07 |
| 76 | 212649_at | 1003 | unknown | | 0.5 | <1e−07 |
| 77 | 229733_s_at | 634 | CBX6 | Chromobox homolog 6 | 0.5 | 2.E−04 |
| 78 | 203603_s_at | 346 | ZFHX1B | Zinc finger homeobox 1b | 0.5 | 7.E−05 |
| 79 | 201110_s_at | 858 | THBS1 | Thrombospondin 1 | 0.5 | 1.E−06 |
| 80 | 1555226_s_at | 554 | C1orf43 | Chromosome 1 open reading frame 43 | 0.5 | 3.E−05 |
| 81 | 1559249_at | 593 | ATXN1 | Ataxin 1 | 0.5 | 2.E−06 |
| 82 | 204286_s_at | 502 | PMAIP1 | Phorbol-12-myristate-13-acetate-induced protein 1 | 0.5 | 1.E−07 |
| 83 | 229204_at | 34 | HP1-BP74 | Heterochromatin protein 1, binding protein 3 | 0.5 | <1e−07 |
| 84 | 219099_at | 642 | C12orf5 | Chromosome 12 open reading frame 5 | 0.5 | <1e−07 |
| 85 | 213183_s_at | 320 | CDKN1C | Cyclin-dependent kinase inhibitor 1C (p57, Kip2) | 0.5 | 2.E−06 |
| 86 | 218611_at | 560 | IER5 | Immediate early response 5 | 0.5 | <1e−07 |
| 87 | 228638_at | 348 | MGC34648 | Family with sequence similarity 76, member A | 0.4 | 2.E−07 |
| 88 | 1566403_at | 931 | RNU68 | RNA, U68 small nucleolar | 0.4 | <1e−07 |
| 89 | 227897_at | 624 | RAP2B | RAP2B, member of RAS oncogene family | 0.4 | 4.E−07 |
| 90 | 229397_s_at | 1017 | GRLF1 | Glucocorticoid receptor DNA binding factor 1 | 0.4 | 3.E−07 |
| 91 | 216609_at | 1008 | TXN | Thioredoxin | 0.4 | 1.E−07 |
| 92 | 222487_s_at | 17 | RPS27L | Ribosomal protein S27-like | 0.4 | <1e−07 |
| 93 | 228746_s_at | 704 | H41 | Hypothetical protein H41 | 0.4 | 3.E−06 |
| 94 | 230659_at | 1019 | EDEM1 | ER degradation enhancer, mannosidase alpha-like 1 | 0.4 | 3.E−04 |
| 95 | 213872_at | 886 | C6orf62 | Chromosome 6 open reading frame 62 | 0.4 | 5.E−07 |
| 96 | 228030_at | 408 | RBM6 | RNA binding motif protein 6 | 0.4 | 2.E−04 |
| 97 | 230333_at | 936 | SAT | Spermidine/spermine N1-acetyltransferase | 0.4 | 5.E−07 |
| 98 | 201694_s_at | 558 | EGR1 | Early growth response 1 | 0.3 | 6.E−07 |
| 99 | 227404_s_at | 685 | EGR1 | Early growth response 1 | 0.3 | 3.E−07 |
| 100 | 212834_at | 292 | DDX52 | DEAD (Asp-Glu-Ala-Asp) box polypeptide 52 | 0.3 | <1e−07 |
| 101 | 231193_s_at | 3 | | CDNA clone IMAGE: 4285619 | 0.3 | <1e−07 |
| 102 | 1559343_at | 978 | UBE3A | Ubiquitin protein ligase E3A | 0.3 | <1e−07 |
| 103 | 244546_at | 666 | CYCS | Cytochrome c, somatic | 0.3 | <1e−07 |
| 104 | 220494_s_at | 618 | | | 0.3 | 2.E−05 |
| 105 | 232392_at | 910 | SFRS3 | Splicing factor, arginine/serine-rich 3 | 0.3 | <1e−07 |
| 106 | 228834_at | 876 | TOB1 | Transducer of ERBB2, 1 | 0.3 | 9.E−07 |
| 107 | 214395_x_at | 1006 | EEF1D | Eukaryotic translation elongation factor 1 delta | 0.3 | 1.E−07 |
| 108 | 214041_x_at | 1004 | RPL37A | Ribosomal protein L37a | 0.2 | <1e−07 |

TABLE 3

| | CIS | Control | |
|---|---|---|---|
| Subject Characteristics | (n = 34) | (n = 28) | P-value |
| Age, y (SD) | 37 (10) | 35 (11) | 0.36 |
| Female, n (%) | 25 (74%) | 18 (64%) | 0.43 |
| Whites, n (%) | 31 (91%) | 26 (93%) | 0.81 |
| HLA-DRB1*1501 positive, n (%) | 13 (39%) | 6 (21%) | 0.15 |

TABLE 5

| Gene 1 | Gene 2 | Accuracy (%) |
|---|---|---|
| RENT1 | TIMP2 | 97 |
| ARFGAP1 | FYN | 96 |
| ARSA | FYN | 95 |
| ARFGAP1 | MAD1L1 | 91 |
| ARFGAP1 | CCDC12 | 89 |
| IVLBL | RALGDS | 87 |
| ARFGAP1 | SLC25A28 | 86 |

TABLE 7

| | | Logistic Regression | | Allele case-control | |
|---|---|---|---|---|---|
| | | Genotype | Trend | | Allele |
| | | p-value | p-value | | p-value |
| Marker | Alleles | (FDR) | (FDR) | OR | (FDR) |
| rs11079937 | A/G | 0.2957 | 0.1197 | 1.55 | 0.075928 |
| | | (0.4928) | (0.1995) | | (0.1265) |
| rs9905480 | C/T | 0.4408 | 0.8671 | 1.01 | 0.951641 |
| | | (0.5510) | (0.8671) | | (0.9516) |
| rs9303568 | C/T | 0.9449 | 0.7719 | 0.93 | 0.767137 |
| | | (0.9449) | (0.8671) | | (0.9516) |
| rs4626 | A/G | 0.0515 | 0.0142 | 0.50 | 0.00882 |
| | | (0.2200) | (0.0710) | | (0.0441) |
| rs7221352 | A/G | 0.088 | 0.0789 | 1.74 | 0.02777 |
| | | (0.2200) | (0.1972) | | (0.0694) |

TABLE 8

| | SEQ | | |
|---|---|---|---|
| Probe set | ID | Marker | |
| Identifier | NO: | Gene | Name |
| 1554021_a_at | 83 | ZNF12 | zinc finger protein 12 |
| 1555981_at | 977 | C17orf65 | chromosome 17 open reading frame 65 |
| 1559881_s_at | 979 | ZNF12 | zinc finger protein 12 |
| 200041_s_at | 981 | BAT1 | HLA-B associated transcript 1 |
| 201168_x_at | 984 | ARHGDIA | Rho GDP dissociation inhibitor (GDI) alpha |
| 206491_s_at | 991 | NAPA | N-ethylmaleimide-sensitive factor attachment protein, alpha |
| 208751_at | 995 | NAPA | N-ethylmaleimide-sensitive factor attachment protein, alpha |
| 208764_s_at | 996 | ATP5G2 | ATP synthase, H+ transporting, mitochondrial F0 complex, |
| | | | subunit C2 (subunit 9) |
| 211716_x_at | 1000 | ARHGDIA | Rho GDP dissociation inhibitor (GDI) alpha |
| 212834_at | 292 | DDX52 | DEAD (Asp-Glu-Ala-Asp) box polypeptide 52 |
| 217800_s_at | 2 | NDFIP1 | Nedd4 family interacting protein 1 |
| 218607_s_at | 116 | SDAD1 | SDA1 domain containing 1 |
| 219571_s_at | 106 | ZNF12 | zinc finger protein 12 |

TABLE 9

| | SEQ | | | | |
|---|---|---|---|---|---|
| Probe set | ID | Marker | CCP | DLDA | SVM |
| Identifier | NO: | Gene | Weight | Weight | Weight |
| 1554021_a_at | 83 | ZNF12 | 4.3768 | 2.3649 | 0.1098 |
| 1555981_at | 977 | C17orf65 | 6.3359 | 3.5256 | 0.3541 |
| 1559881_s_at | 979 | ZNF12 | 3.7162 | 3.4642 | −0.0452 |
| 200041_s_at | 981 | BAT1 | 8.0788 | 6.3002 | 0.2024 |
| 201168_x_at | 984 | ARHGDIA | 6.497 | 4.1222 | 0.6968 |
| 206491_s_at | 991 | NAPA | 3.982 | 3.8487 | 0.0581 |
| 208751_at | 995 | NAPA | 6.3683 | 3.0382 | 0.3013 |
| 208764_s_at | 996 | ATP5G2 | 5.054 | 2.0654 | −0.161 |
| 211716_x_at | 1000 | ARHGDIA | 7.6281 | 5.1502 | 0.8128 |
| 212834_at | 292 | DDX52 | −6.3979 | −3.7853 | 0.0043 |
| 217800_s_at | 2 | NDFIP1 | 4.238 | 1.405 | 0.2908 |
| 218607_s_at | 116 | SDAD1 | 5.4416 | 3.531 | 0.3313 |
| 219571_s_at | 106 | ZNF12 | 3.7024 | 1.9058 | −0.1719 |

TABLE 10A
CCP
No Std threshold = 462

| | MS | No MS | |
|---|---|---|---|
| over threshold | 12 | 0 | 1 |
| under threshold | 1 | 21 | 0.955 |
| | 0.923 | 1 | |

TABLE 10B
CCP
GAPDH Std threshold = −200

| | MS | No MS | |
|---|---|---|---|
| over threshold | 11 | 2 | 0.846 |
| under threshold | 2 | 19 | 0.905 |
| | 0.846 | 0.905 | |

TABLE 10C
CCP
ACTB Std threshold = −326

| | MS | No MS | |
|---|---|---|---|
| over threshold | 12 | 0 | 1 |
| under threshold | 1 | 21 | 0.955 |
| | 0.923076923 | 1 | |

TABLE 11A
DLDA
No Std threshold = 290

| | MS | No MS | |
|---|---|---|---|
| over threshold | 12 | 0 | 1 |
| under threshold | 1 | 21 | 0.955 |
| | 0.923 | 1 | |

TABLE 11B
DLDA
GAPDH threshold = −129

| | MS | No MS | |
|---|---|---|---|
| over threshold | 11 | 2 | 0.846 |
| under threshold | 2 | 19 | 0.905 |
| | 0.846 | 0.905 | |

TABLE 11C
DLDA
ACTB Std threshold = −201.5

| | MS | No MS | |
|---|---|---|---|
| over threshold | 12 | 0 | 1 |
| under threshold | 1 | 21 | 0.955 |
| | 0.923 | 1 | |

TABLE 12A
SVM
No Std threshold = 22.2

| | MS | No MS | |
|---|---|---|---|
| over threshold | 13 | 0 | 1 |
| under threshold | 0 | 21 | 1 |
| | 1 | 1 | |

TABLE 12B
SVM
GAPDH Std threshold = −9.3

| | MS | No MS | |
|---|---|---|---|
| over threshold | 12 | 1 | 0.923 |
| under threshold | 1 | 20 | 0.952 |
| | .0923 | 0.952 | |

TABLE 12C
SVM
ACTB Std threshold = −15.2

| | MS | No MS | |
|---|---|---|---|
| over threshold | 13 | 2 | 0.867 |
| under threshold | 0 | 19 | 1 |
| | 1 | 0.905 | |

TABLE 13

| Probe set | SEQ ID | Marker | |
|---|---|---|---|
| Identifier | NO: | Gene | Name |
| 222032_s_at | 1014 | USP7 | ubiquitin specific peptidase 7 (herpes |
| | | | virus-associated) |
| 214684_at | 1007 | MEF2A | myocyte enhancer factor 2A |
| 210081_at | 998 | AGER | advanced glycosylation end |
| | | | product-specific receptor |
| 220964_s_at | 1011 | RAB1B | RAB1B, member RAS oncogene family |
| 201864_at | 986 | GI1 | GDP dissociation inhibitor 1 |
| 210125_s_at | 999 | BANF1 | barrier to autointegration factor 1 |

TABLE 14

| Probe set | SEQ ID | CCP | DLDA | SVM |
|---|---|---|---|---|
| Identifier | NO: | Weight | Weight | Weight |
| 222032_s_at | 1014 | −7.619 | −16.193 | −0.348 |
| 214684_at | 1007 | −6.628 | −9.532 | −0.575 |
| 210081_at | 998 | 4.645 | 7.067 | 0.42 |
| 220964_s_at | 1011 | 4.885 | 9.443 | 0.472 |
| 201864_at | 986 | 5.171 | 6.959 | 0.537 |
| 210125_s_at | 999 | 6.773 | 7.182 | 0.88 |

TABLE 15A
CCP
No Std Threshold = 68

| | MS | No MS | |
|---|---|---|---|
| over threshold | 12 | 0 | 1 |
| under threshold | 1 | 21 | 0.955 |
| | 0923 | 1 | |

TABLE 15B
CCP
GAPDH Std Threshold = −20

| | MS | No MS | |
|---|---|---|---|
| over threshold | 12 | 1 | 0.923 |
| under threshold | 1 | 20 | 0.952 |
| | 0.923 | 0.952 | |

TABLE 15C
CCP
ACTB Std Threshold = −30

| | MS | No MS | |
|---|---|---|---|
| over threshold | 12 | 0 | 1 |
| under threshold | 1 | 21 | 0.955 |
| | 0.923 | 1 | |

TABLE 16A
DLDA
No Std Threshold = 53

| | MS | No MS | |
|---|---|---|---|
| over threshold | 12 | 0 | 1 |
| under threshold | 1 | 21 | 0.955 |
| | .0923 | 1 | |

TABLE 16B
DLDA
GAPDH Std threshold = −0.3

| | MS | No MS | |
|---|---|---|---|
| over threshold | 12 | 0 | 1 |
| under threshold | 1 | 21 | 0.955 |
| | 0.923 | 1 | |

TABLE 16C
DLDA
ACTB Std threshold = −10

| | MS | No MS | |
|---|---|---|---|
| over threshold | 12 | 0 | 1 |
| under threshold | 1 | 21 | 0.955 |
| | 0.923 | 1 | |

TABLE 17A
SVM
No Std threshold = 12

| | MS | No MS | |
|---|---|---|---|
| over threshold | 12 | 0 | 1 |
| under threshold | 1 | 21 | 0.955 |
| | 0.923 | 1 | |

TABLE 17B
SVM
GAPDH Std threshold = −4.3

| | MS | No MS | |
|---|---|---|---|
| over threshold | 11 | 1 | 0.917 |
| under threshold | 2 | 20 | 0.91 |
| | 0.846 | 0.952 | |

TABLE 17C
SVM
ACTB Std threshold = −7

| | MS | No MS | |
|---|---|---|---|
| over threshold | 12 | 0 | 1 |
| under threshold | 1 | 21 | 0.955 |
| | 0.923 | 1 | |

TABLE 18

| Probe set | SEQ ID | Marker | |
|---|---|---|---|
| Identifier | NO: | Gene | Name |
| 1555981_at | 977 | C17orf65 | chromosome 17 open reading frame |
| | | | 65 |
| 214123_s_at | 1005 | C4orf10 | |
| 239487_at | 1020 | FAM98A | |
| 228284_at | 844 | TLE1 | Transducin-like enhancer of split 1 |
| 207688_s_at | 993 | INHBC | |
| 208751_at | 995 | NAPA | N-ethylmaleimide-sensitive factor |
| | | | attachment protein, alpha |
| 208700_s_at | 994 | TKT | |
| 216520_s_at | 138 | TPT1 | tumor protein, translationally- |
| | | | controlled 1 |
| 1564164_at | 11 | FLJ20054 | Hypothetical protein FLJ20054 |
| 212840_at | 104 | KIAA0794 | KIAA0794 protein |
| 226643_s_at | 184 | LOC134492 | NudC domain containing 2 |
| 228638_at | 348 | MGC34648 | Family with sequence similarity 76, |
| | | | member A |

TABLE 19

| Probe set | SEQ ID | Marker | |
|---|---|---|---|
| Identifier | NO: | Gene | Name |
| 205789_at | 376 | CD1D | CD1D antigen, d polypeptide |
| 212063_at | 275 | CD44 | CD44 antigen |
| 212540_at | 553 | CDC34 | cell division cycle 34 |
| 213183_s_at | 320 | CDKN1C | Cyclin-dependent kinase inhibitor |
| | | | 1C (p57, Kip2) |
| 227259_at | 1015 | CD47 | |
| 207460_at | 617 | GZMM | granzyme M (lymphocyte met-ase 1) |
| 217602_at | 1010 | PPIA | Peptidylprolyl isomerase A |
| | | | (cyclophilin A) |

The application's sequence listing, which the Patent Office published only in electronic form, follows.

SEQUENCE LISTING (1022 sequences)

SEQ ID NO: 1 - DNA, 429 bp, homo sapiens
ctgaagtcattcatcattttctagaaaatttatgattggcattttgattggaatcccttggaattcatcagttagagttgactactgtaggctattaaaacgtcttcctataagaatgtagatatcagactggtgaaaatttaaggagctgaagtaattttaaattttaattgtaagattttcgtggaggtgatttttcaaaaaggtttagttactgatgttggttcctgtgttatttctggtagatgaatcaattatattaggtaaaagtattatcattggcatgattaaaaagatgttttagcttaaaacctaaatgatgggttgataggtacagcaagccaccacagcatgtgtatacaacctgcatgttctgcacatgtatgtaacaaacctgcatgttctgcacgtgtgtttaacaaacctgca

SEQ ID NO: 2 - DNA, 531 bp, homo sapiens
ccatatttgctgttcaagttaatctagaaatttattcaattctgtatgaacacctggaagcaaaatcatagtgcaaaaatacatttaaggtgtggtcaaaaataagtctttaattggtaaataataagcattaattttttatagcctgtattcacaattctgcggtaccttattgtacctaagggattctaaaggtgttgtcactgtataaaacagaaagcactaggatacaaatgaagcttaattactaaaatgtaattcttgacactctttctataattagcgttcttcacccccacccccacccccaccccccttattttccttttgtctcctggtgattaggccaaagtctgggagtaaggagaggattaggtacttaggagcaaagaaagaagtagcttggaacttttgagatgatccctaacatactgtactacttgcttttacaatgtgttagcagaaaccagtgggttataatgtagaatgatgtgctttctgcccaagtggtaattcatcttggtttgctat

SEQ ID NO: 3 - DNA, 506 bp, homo sapiens
taaaaaccaaccctggcatttgcacaaataatgcaaatggagtgatatggcctttaaggaaggagttagtagaaaggaagagggaagtgaagaaaatccagagaaaatgatgtactaatttctttcttttaaaaaatttctacatgtgcaaaaaaatcatgctgtttgaggaaaacaaagggaaatgagtacataaaactaaaaacataaatatgtttgggtgactggtaaaagtagaaaccaacctgggttacaaaaaggattatacattcaagatgctcttaaacccagtgggataacttatgttaaaactgtgttaatagttacgttaaaaatctcaagtttgtttttaaatcttcacaatacaagcaaagctgttttaaaatatacactatacatatttctcatagtctcttcaacctcattaatgcgcattaggctttttcatatactaaaacaagggggttctgaaagcgaaattgctcatagtaacccatccattattt

SEQ ID NO: 4 - DNA, 398 bp, homo sapiens
  misc_feature (74)..(74): n is a, c, g, or t
  misc_feature (83)..(83): n is a, c, g, or t
ggtggcccatgaattgtcagctgatgaaggaacactatttggtttttggcatgcaactcggaaagaaaccaaangattgattnacatgcttacaacaaaactactagcattctcacctatttatgtaaaaccatttctcagcacttgtatctgtgaaaacaacagaattgaaaatgaaccctgttaatctaccagtaggaactattcatccagataaatgaattaattggtgggtcagccccatctatctcactaagagatgtgttcccaatagaatttcaccttttataactgtgtgttatcaatatttgcaatcgtgtcattttgatccattatatactaaagatgattgtgatgattactcacttcagaagaattccagcgtagagccataaagt

SEQ ID NO: 5 - DNA, 300 bp, homo sapiens
gttgttccaatgaatgtacagcacttccattaacttttgaaagcaacacagccttaaactcaatgcttttgctttatgacatgggaatgttctgtcatcaatggagtgtattcttgtaatagaattctttatatcgttctcaattctatagactttcaagcctatgtatgaatatgaaggggtttttttttttttgctttgttttctttttagattttgtacattccatctttataggtctgtttcatatgttttatgtatagaacactaagtcttgcactctctgacattgatactgat

SEQ ID NO: 6 - DNA, 427 bp, homo sapiens
  misc_feature (43)..(43): n is a, c, g, or t
  misc_feature (49)..(49): n is a, c, g, or t
  misc_feature (52)..(52): n is a, c, g, or t
  misc_feature (54)..(54): n is a, c, g, or t
cagtgctccatgtgattcattgactgtgagcctgttgtccatngcactnagncntgtactcacttcttcactcgctgtcctggttttactgttcagattttggtgggttctcaaagcagtaccactctcatctgctcagtacatctgcggcaactggctgccttcgatgctgtcattgcgttcagcccagcacatcacagccccatcagtgtgtagccaccgctctcgtttttctgtatcgcttttatctcctgaaaaagatgcaccaaataagagatcatctatatcaggaattgaatgtctaactcaaacctctcatttttgtttaataggtagatctcatttgaagtctcctatctgaatctctgaaacaattatagtttgattagacaaaggtttttaataacacttcttttttgctgtagtc

SEQ ID NO: 7 - DNA, 270 bp, homo sapiens
  misc_feature (89)..(89): n is a, c, g, or t
  misc_feature (197)..(198): n is a, c, g, or t
  misc_feature (202)..(203): n is a, c, g, or t
  misc_feature (205)..(224): n is a, c, g, or t
gttacttaataggtactcagcctggagtgaaaatcctgggtactgactttgagaggagtgagtgtgcatgttgtcaaagtttctgaacncagttcacatagccttattagcaaaagttttaagaaatggctctatcaaagaagcaattgcagctttattcagaaatataaaagtggaatttatgtacatgtcataannggtnncnnnnnnnnnnnnnnnnnnnngggtggataactcttaggatttaactctttgaatattatctcttga

SEQ ID NO: 8 - DNA, 523 bp, homo sapiens
accagcatcctatatacagctccacaggatgtgcttctcttcatggtaattttccatatatatcatctactttgatttctgccccgttttaatgtccatataaatgtttcagtccaatttgtaagtgttgagtccactgatgtagaagttctgacttgtaaaccattcatcctgctttagtcatatgatagtaccgatgcaattagctcctctcccaccaccgtgggggatttctccctgagatgaggtgtgctttgaccagctgcatgtggcttgattgcattcctgtttctcttagttccactggatcttgttttcttttatttcgttatattacctgagctcagggtagttccgttcatctttagaaagagctcatctcttccatccttagaaggatctcatcagagaactcatatgtaatcaatcaggtaaaagaaatactgatgtacttctgagagactggtgagaggtgggtcataggaagcccataggtctgaggaccgagtcagtgtcttgggga

SEQ ID NO: 9 - DNA, 565 bp, homo sapiens
  misc_feature (128)..(128): n is a, c, g, or t
  misc_feature (232)..(232): n is a, c, g, or t
  misc_feature (434)..(434): n is a, c, g, or t
  misc_feature (461)..(464): n is a, c, g, or t
aaaatactttccagtcagacttctcgtcaattataggtgataaataaatgattcccttgttcaatcaggactcttgattttctgaaggaactttatgtttcaaattaattttaaagttacctggaagnaaatttttgtatttaggaatagatataaaacatacagaacactctgctttaaacctttagtactaaattaaatttcttaaccaaaggaaagtgccgtgttgcantttttcattctaaaacttcattgtcttaaaagccacattgagctatagtttgttaggtagtagaaaaatggcatgttctgagaaacagttgactgagtataaatttttttaattgtataattctgattcttaacatacacttcatagtatcctagaatagtaaaaggaacaaagttattgtgacacagactggttgtcaacntattttctgaagagctgtaaacctgannnnttgcatatgtcaaggtatgcatcctaagtgcttgagcttgccctcatgggaatattatttgttaaagtaaccagttttgcaaagtctaaatcagcgtccat

SEQ ID NO: 10 - DNA, 522 bp, homo sapiens
gagatccccatgaagaaatactcaaggcatttaaactatttgatgatgatgattcaggtaaaataagcttgaggaatttgcgacgtgttgctagagaattgggtgaaaacatgagtgatgaagaacttcgagctatgatagaagaatttgacaaagatggtgatggagaaataaaccaagaggagttcattgctattatgactggtgacatttaaagaattacaaggataaacactaagaatgttgcagttaccatcttatattctatttttgtgcctggagccatgtgaaaaaaaccaacttagttcttttatcctaaaggaccaaaaataagcatcttatatatctgtattttactactgttaagtttctttgtatgaactgtgttgttagtactcagatagtttagctttgtatttataatagagcttttatataaagttttaaaaattgaatgtgtgatatgtgttctttgaaggttttttaatttaacatttatagtcactttttagtgcacacatt

SEQ ID NO: 11 - DNA, 501 bp, homo sapiens
atgccttcagagcatatttttctgtaatattgaactactttgaaatccattattaaggagtttgagaaagtgaatttaaaaatcctaaactcaaaaatacactaataccagccttgattgtccttctgtctaatgataggaaaaatatgattttaaagtcaaaatcagattatttatgcccataataccgtaaaatacttgctgaccttgagacatattaaaattcaactaccttatcttactgtagtaaaacttatgctatgaatgtacaaatctaatcctaggccagtgaaaaattacatctttttagctcattataactagattacctcattataaaatttttgcaaaaacaaaatcacaaagaaattattagagttactcatttaaaaactaatcaaagtattattcaatggatagagaaataattatgaaaatagaatcccaacttttaagaatgctttccttatatgcatgtacttcctaccgttaatgccttag

SEQ ID NO: 12 - DNA, 526 bp, homo sapiens
  misc_feature (277)..(277): n is a, c, g, or t
gacttctgggaagcgtgctaacgataaagaaagaatcagaataaaatgtacctgccatccagttttggatctttttaaaactaatgagtatgaacttgagatctgtataaataagagcatgatttgaaaaaaagcatggtataattgaaacttttttcattttgaaaagtattggttactggtgatgttgaaatatgcatactaatttttgcttaacattagatgtcatgaggaaactactgaactagcaattggttgtttaacacttctgtatgcntcagataacaactgtgagtagcctatgaatgaaattcttttataaatattaggcataaattaaaatgtaaaactccattcatagtggattaatgcattttgctgcctttattagggtactttattttgcttttcagaagtcagcctacataacacatttttaaagtctaaactgttaaacaactctttaaaggataattatccaataaaaaaaaacctagtgctgattcacagcttattatccaattca

SEQ ID NO: 13 - DNA, 514 bp, homo sapiens
caggcagtactgttgagaggagagcagtgtgagagtttttctgtagaagcagaactgtcagcttgtgccttgaggcttccagaacgtgtcagatggagaagtccaagtttccatgcttcaggcaacttagctgtgtacagaagcaatccagtgtggtaataaaaagcaaggattgcctgtataatttattataaaataaaagggattttaacaaccaacaattcccaacacctcaaaagcttgttgcattttttggtatttgaggtttttatctgaaggttaaagggcaagtgtttggtatagaagagcagtatgtgttaagaaaagaaaaatattggttcgcgtagagtgcaaattagaactagaaagttttatacgattatcattttgagatgtgttaaagtaggttttcactgtaaaatgtattagtgtttctgcattgccatagggcctggttaaaactttctcttaggtttcaggaagactgtcacatacagtaagcttttttccttct

SEQ ID NO: 14 - DNA, 454 bp, homo sapiens
  misc_feature (410)..(410): n is a, c, g, or t
gtggcctggcccttgaaatagtagtgtttaggtagatgcttgtgtaggattcctgataagagcaactgaaaagaaggagaggggaagtagtaaagggacaagaaacaattttttttttgaggaaccataagcaaattatagtttgacaagacaagattgggggacatatatggttaccagggaattacctcttatgtgttatatctttatattatttatctctggaaaagagtaccctgcaaaattccctacagctgcaagcagatgtcacttgatggacagagggggaattctgcccctccggtatcgggaaatacatactaaagacattgcgaaacgctgaacctcttcccataaataaaaggtttgtttgtaaaatgggaaatccacccataataaatgaacaatangcactgccagtttaggcctgttcatgaatggatctgcaagacag

SEQ ID NO: 15 - DNA, 490 bp, homo sapiens
tggctaccctcagatacaatgatggtaaccccatgagtgctgttaaagcaatttgacttattgtagacaggttaacacatgagatgcgttaaaagagttaagtgaaataataggcagcattcaaagagcaaatcgtggtctttggcagaaaatagagttaattttgtatttgagctgtccagttattacaattagaaaacgttttaaagaatccaaaaggatttaaaatattgcataaagttttaggagaaaatggtttccaaaaagcaactgcatatgaaataagcactaaaatgacattaaagtacaatgtaagaaaatcggaactagaagcatttgctggagtctgaagaaaaagatttatggatgaatgattctgaaactaacttctatagagacaattttccggcgatggtagatcaaggtgtagattgtactgaagagagagattcaaacaaagtgagtaatctaccgcagttttcagttttct

SEQ ID NO: 16 - DNA, 314 bp, homo sapiens
  misc_feature (255)..(255): n is a, c, g, or t
gaaactctgtagtcaaatttgttcagcagcttcagaagttgaatgaattgtttattagaataattaattcttagttattaacaattgcaaaaactataggttaaaaataatctgaattccaaccccaggaatggtagaatttgtaattttatctgcttgtgcacatacttgtaatggagtatcatatactatttattgaaaatcttatttttgattcattttatcaaattaactccctctacccccaaaaacagncgtagtaccacttttgaattagatttgtgatcttacctagcaccttgaatttgtaagaa

SEQ ID NO: 17 - DNA, 402 bp, homo sapiens
ggagattactgctgtataccttacaaaaccaaatgtaattacattatcttggtaaattaattagaattatggaatttatgataaggctttctgtgagacaacacacaaattaaaattcaggaagctgtttgaatcattagtgttgctttcttctaaatgaacacccttctgtgagtctggcctttcctcctgtaggctggcacaacactgttgaacaacctacacaaagaaccactgtctgagcatggctgaaaaccgtggtgatcttgtagcaacctggacattttacatccataaagtaagaatttggactttgtactaggcgtttctttttatgttttttcttttcctcttccaaggacggatgtagtaaatctctagccaaaggcatgttgatcctct

SEQ ID NO: 18 - DNA, 371 bp, homo sapiens
attgatctctctgcaaacctagacaaaaagaataaagttgaagggaaccttgggttatcatcttgtctgcctccggttgttggtggtggggatttttgattctgaatcaccttccagtaatgggtattctaaaagatcttcaggaaaacaggctttctcagtaattttcaggagctctcactgacaataagcttttttaaaaaatttccattgtaaatcactctaaaccgaattttttttggcctgtaatcacattgctttcttggttgaaagagaactagttttatttgtatagtagaagatagttgtattttctcatttttttctacatgagactaaatgactatagtttcattaaaccttctttgctt

SEQ ID NO: 19 - DNA, 307 bp, homo sapiens
  misc_feature (70)..(70): n is a, c, g, or t
aactatatatcaaatgtcactgcaaattagttttatatctgtcatgtgagatttgtcttacttatttttnttttggttgccatggaagttatggccctgaaaatcgtctccctccccttctcttgctgtacagcatgcgttctctttttgtggttgctggctgggtactgtatttaatgaagtagagaatagcacttgcaaaaatacagtcttggtacctagagactgtcatgcagatagtataatttggtatatgtgctaatgcattgagtagaggattattttaacacactattttgcttttgta

SEQ ID NO: 20 - DNA, 509 bp, homo sapiens
gagtgttgattagattctgtgccaatcatggtaattggcttacttgatcatttgatggaatctaggctaacgagacaaaggaagtctgaaggctttgaataagaaattttctgttgctcttaacaattgatacaagttagggatttgccagcatccctcttctgcttctcagtgaagatatgtgatatggatgtttgaagctaatctgcaacagccttctgatggccatgaaaggacaagtatggagatgaaagctatcacactgagaatagtgggatgtagatagaaagcacctgaattgtgcttctgaattaaccaatccaggaactgctttacctttggactttttgttatgtgagatattctttatattgttccatttgctttgggtatatgtatattgttacttgtagccaaaaagaaacctctcttagtagaaacaaagggagagttaggttattcaaaaattagtatgggacaattgaatatgcctttttctgcgggagtag

SEQ ID NO: 21 - DNA, 508 bp, homo sapiens
gtagtgctcctaacatgtattatcaactttgtggattacattggaggaaaatttaaaactggggccttgaatatttattttttgaaactaccatgttaaatactgaagtataatttgggggagttataaagttatgataaacattcatctgattattttaaacaatagttgtggtagataaacatactggaggtgagtcaaattgaattcatatagtaacatgcagtctgaagtcctagttacttaataggtactcagcctggagtgaaaatcctgggtactgactttgagaggagtgagtgtgcatgttgtcaaagtttctgaacacagttcacatagccttattagcaaaagttttaagaaatggctctatcaaagaagcaattgcagctttattcagaaatataaaagtggaatttatgtacatgtcataagtggtacccacttcccctttttactgtagggtggataactcttaggatttaactctttgaatattatctcttga

SEQ ID NO: 22 - DNA, 504 bp, homo sapiens
aagaccaacttggctgttcatgaagataaaaacagagtcccgtatgtaaaggggtgcactgagcggtttgtgtcgagccctgaggaagtcatggatgtaatagatgaaggcaaagcaaaccgacacgtggctgtgacaaacatgaatgaacacagctctagaagtcacagtatcttcctgataaatattaaacaagagaatgtagagactgaaaaaaaactcagtgggaaactttatttggttgatttggctgggagcgaaaaggtcagcaaaactggtgccgagggagctgttcttgacgaagctaaaaatatcaataagtctttgtctgctcttggaaatgtgatctctgctttggcagaagggacaaaaacacatgtgccataccgggacagcaagatgactcggattcttcaggactctttgggtgggaactgcagaaccaccatcgtcatttgctgttctccttctgtcttcaatgaggctgagaccaagtccacactg

SEQ ID NO: 23 - DNA, 496 bp, homo sapiens
gaaagttctagttgctcttcatgctcactaacatctgatattgttctccatttgattttagtcatgttagtagatgtaagatgttagttgcatttccctgatgagtactgatgttgagaacttttcatttgcttgttagccagtcacatattttcttttgtaaattgactgttccaatcttttacatgttcttaaatctcattatttttgttattcatatcaacagttaccaatagggcatttttatattttatcactagaaatcctttgtcacatatacatacctatattgcagatatttttcctcaaaggcatgtcttgcttattcattttcttttccttagtgatgtcttttgatgagcagaaatgtcttgatcatggtagttttatagtagtcttgaaatcaggtgatgtaagttatctttttcaagattgttttgactaatatagattctttgatttttccctaatgtggcaatcaacctttcctgccacc

SEQ ID NO: 24 - DNA, 223 bp, homo sapiens
  misc_feature (170)..(170): n is a, c, g, or t
atatctgaactatgaatgccgccctggttattccggaagaccgttttctatcatctgcctaaaaaactcagtctggacaagtgctaaggacaagtgcaaacgtaaatcatgtcgtaatcctccagatcctgtgaatggcatggcacatgtgatcaaagacatccagttcngatcccaaattaaatattcttgtcctaaaggataccgactcattggttcctcg

SEQ ID NO: 25 - DNA, 232 bp, homo sapiens
  misc_feature (30)..(30): n is a, c, g, or t
  misc_feature (44)..(44): n is a, c, g, or t
acacggtgagtgattttagctttttttccnggccctcctaccancccacacatacactttctcgacacataaaggagatatgtaaactgaggtcccgggtattgctacagcaaagacggtggtcctgattcccacgatactgccagattatacttacgtcatcagagtggctctttgagatccagatgatgtgagttatggtgaagtcacctactgctactcatactgcaga

SEQ ID NO: 26 - DNA, 330 bp, homo sapiens
gtgctgcttttggtaacttatccctttttctcttaagaaagcaggtactttcttattagaaatatgttagaatgtgtaagcaaacgacagtgcctttagaattacaattctaacttacatattttttgaaagtaaaataattcacaagctttggtattttaaaattattgttaaacatatcataactaatcataccagggtactgcaataccactgtttataagtgacaaaattaggccaaaggtgatttttttttaaatcaggaagctggttactggctctactgagagttggagccctgatgttctgattcttcaaagtcaccctaaa

SEQ ID NO: 27 - DNA, 391 bp, homo sapiens
  misc_feature (290)..(290): n is a, c, g, or t
cccacctgtttcttactttatgagaccacacctaaaagatagaagactgctttgcaaccaagaaatccttcatgaacacctctttaatcacaagtcctcaactccaaggttagctttatttcaacttttataatacttttcttacttttcttgatagctttaccacccatgtattcattcctaaaaaatacacagttttgtctgattttgaattttatgtgaatggaattgtacatatctgtgtttgtgtcttccttgttttactcaatactgtttctgagatcaatcanattatttgttaatattttgtttaggatttttgcatctctatttcagtgtgtgtttggaatgtaaatttccattctcagactatcttttggcctgaatttgg

SEQ ID NO: 28 - DNA, 437 bp, homo sapiens
ttggccccttgatatataaagtgtctaaaagcattacaacaggactcacaaagctcctaagtttcacttttgcaaacaaggtatctgtgactcccgcttgtggtgttttaaatttacctttattccatagccctgagtttctgtgagtccaggacatctcctcaatacaaagtagccactgtgttcctatgtgttgcaaccaggagtcagtacagacttcattcacctcaaagttgcaagcgctcgatgcagtcacaatgtccatcaccagtgctcatgcactgcctgtttttaggaagtatccacatctaagtggtgtgtatatttcttaggaacacttagtatttttaaaacctgattaacataaaaacaattagtttttaagcagacccacttaaggtattaaaggccaactgcaagtaacaccctgcgaggct

SEQ ID NO: 29 - DNA, 370 bp, homo sapiens
ttctcctacacatgacctttgacagactaagtatatctcagctattgagggtatctgttttgttgcctgtatattttgtttaaattaacttgtatattcctttgtatacacctaggcacagatgtatgcaaaaaaaatttgttaaattacttctttctttatactaattctcaatttttaaaagattttatctggcatgtatatacttttatatagaacattataaatgtaaaggaaatgaattctaattttaattggattatgtattcatacagttattctcaatttttaaaatactaataatgtaatcattgaatgtttcctacatacgtagtgggttttatttgctcacagcatacagttatttttc

SEQ ID NO: 30 - DNA, 448 bp, homo sapiens
gaattgttctttaatatctttccaaaatgactttggttaaatggaccagatgtatattagttaaaatttaggactaagttgttgatattctttgagtttacaagttaatccttattggagatgtgccaatatacagttagaatatcattaatttgcactgtttggggaccccatttaagaatgctgaattttgccaactaagaagtaagcaaatgcaatttaaaaagtaaatttgagcattctgtattaaatatgtgcagttattatcacatgaagaaacgcagtgtgtcgggctgtaatattaccatatttgctgtcatgttctcccatctcagtgctgggaaatcaccatgtggaaaccaagcaaacgtgttgtgcatcagccggcttgagtttgttcaatatcaaagctgaaaactagcgaggtctgctgtactgcttattgaag

SEQ ID NO: 31 - DNA, 337 bp, homo sapiens
agtgtgagggatgctgaatctcccagagagctcacactggccaggaatgctgagagtagcagatgcttttcttttgggaggatagtaaaacaatttagaaccagatatgctttgtcttgattctcaagtagaataatcttcaaatgcaaaagaatacattagaaatggacaaaagtggccaggagcggtagctcatacttgtaacccagcactttgggaagccgaggcgggctgatcgcttgaggtcaggagttcgagaccagcctggccaaaatagtgaaactcacgtttctactaaaaatacaaaaattagctgggtgtgatggccacttgggag

SEQ ID NO: 32 - DNA, 509 bp, homo sapiens
gcccctcaccaatgcatatgaagagtatgcttggggaagagcttaggaatggggtgggcatgggactgctgggtagcagcctttgagcaaatctgcatcttctcttatttctgacctttttccacgtgcccagtcctatttctgccagttgaaggcatactaatattctttatactatttaatcttttgcagaaaccttactattataacttgctactctccagataccaattcttcatgccgagagcatcggaaatgtttttgtgtcttactgatgttttcatgatcaacttgtaaatgtaagcagttgacttcataaaaggtattttaactattcttggagtcctttgctacccaagcacctggtttcaccatgcgatcactgacttctctacagtgaagactctttcttaatataggatttcgctgtgctcttttgattaaaaatatctaaccttaaaagacgtaaaaatgtatctgtgaaatctcactttgttagcgttgctgct

SEQ ID NO: 33 - DNA, 431 bp, homo sapiens
  misc_feature (158)..(158): n is a, c, g, or t
  misc_feature (215)..(215): n is a, c, g, or t
  misc_feature (219)..(219): n is a, c, g, or t
aaatgagttttgtctgaagtttccaagtatgacctatgctttttcttagctaatttttagcaggagatgatgagggctaaaaattgagacattagggcatttagttacatctctcaatttgtgactggtttataaaaaatactaagatgtgtctgctnactcacacctgatttatctactccttttatgtatatataattttttttgagttgtgnaccnaaagttggaacatttcaagtattttttctttctgtcactgagtgatttcatgtagaacatttactgttttgtgtattttgaataaatggcaaaaatcttattaaacattagctgttaataattagaaaaatacagtaagtcttcaaatatttataattgatatttgtctttgtttttatatgtatttatattgatgttatatgctcatcttt

SEQ ID NO: 34 - DNA, 424 bp, homo sapiens
aacaggaaagattgccttacatgcaacacaaattccaatgaattcatgatgggatcacacatgattatgatctaattcaagccaatcttctcaagtccatttcccagccatactttaggctacagaagggatcccaggagacaaaagtggaatgaataagaaacaaacatcttttgcctctggcagtactcaaggggccagaagatgtacttcaaaaactttaagacaattaaaatgtcaagtgccacagggaagagaaatgataaccagaaatttgtatttctagctagtactatttaacacaacttcacaatactaaaacaaatacaaataagaaagggttaggtagttgggcttcatttacttttttccttttctttttttttttaatatctcaaaaaggaagccacttgcttgatatcaa

SEQ ID NO: 35 - DNA, 333 bp, homo sapiens
gatgtttgttcccaatggttccttcatttgtgattacttcaattctataggtggaagtcaaggttcttaaagcatcatgttgctgctattactgtaaacattatcaaaattgtacgtaattttatgcttaacactgtgggttttggtttctaaagtgagaaaattgttaggattccagccctacactgacaatcatcttttaaataagtgcaattattgaaataccagtatttttactttatagaacagatgtcaatttccacagagggccagagggtaaatactttcggctttgtgggccatatggtgtctgtcaaggctacttaactccaa

SEQ ID NO: 36 - DNA, 360 bp, homo sapiens
ggctcatctaattactacattggctcaaaaatccaggacatcttctgaatcaggcctagctgcagatgaggctcctcgggtgcagtttgttgggaacagattatcaagtacatttcctctacagtttaagacctgtgaactaaaaactcaagttatctatcagccacctcatcctctcatctccctcacattgtaaaatggtgcttgaggaataatgcaatagatagtcttactcaaaaaggagtggggtagagtaggaggcacatggtagtcaccatctgtagaaattctggtatctaccggtcatcactgccccagggtcaaaagatacactttgattaagatccagttttgctctgc

SEQ ID NO: 37 - DNA, 294 bp, homo sapiens
gatagacggtatgtgaagggtggatggctgcattgaacaattattgtaggggtagcatttaagattcaggagtcattagcagtgatgattttgggacctgccgtataatctgttcttctattcccacgttagccaattgttcttgatgaatctatatgagtcatagaacacaaatctattgacggaagtcattagaatggcttgtgatatctgatggcttgaacttgcccacagttgaacacaagtgctgtcattgcatttcttccattgtgaatacgaattttcttcctcaga

SEQ ID NO: 38 - DNA, 381 bp, homo sapiens
  misc_feature (88)..(88): n is a, c, g, or t
gaagcagttccttttatttacctatttttaaaatataatacttgacttaattgtattagtaaaaaatcacagaatctgccaataggtnacaaaagagctagttagtgggttattttagatcttttcctggggttcaggtcacatagcttaactttgttcaacttttataaagatgaaaagtaaagcaagaaatgatagattactctagtgcactacatcaacatatttataaaaggaagaaaaattaagaggaagaaaaattaagtccaaactgctttccttgactaagacataacatcatctcattcaacttccaggtagtacttggcagttactgtactgaaaacactctgttcgtttgagtccaggatacagtctctt

SEQ ID NO: 39 - DNA, 474 bp, homo sapiens
aagagacttttcgattagtcctcatatatttatctactaaaatagagtgtttaccatgaacagtgtgttgcttcagactattacaaagacaactggggcaggtactctaatataaaggacaggtggtgtttctaaataattggctgctatggttctgtaaaaaccagttaattctatttttcaaggtttttggcaaagcacatcaatgttagactagttgaagtggaattgtataattcaattcgataattgatctcatgggctttccctggaggaaaggttttttttgttgttttttttttaagaacttgaaacttgtaaactgagatgtctgtagcttttttgcccatctgtagtgtatgtgaagatttcaaaacctgagagcactttttctttgtttagaattatgagaaaggcactagatgactttaggatttgcatttttccctttattgcctcatttcttgtgacgcc

SEQ ID NO: 40 - DNA, 346 bp, homo sapiens
  misc_feature (32)..(32): n is a, c, g, or t
  misc_feature (120)..(120): n is a, c, g, or t
  misc_feature (180)..(181): n is a, c, g, or t
  misc_feature (259)..(259): n is a, c, g, or t
aaagcagactctggaactccatctccctgagnttgtcactcatggggtctgcaggaagtttcaggaatctgcattttcttctaataaacgtggtccacaggttataagttgagatacaantagaatatataaagtaaaaaaggaaaatttgaagtttcctgcctagcccaactcttctcnnattggtagtgtctgttaaattggaaacatatctctttccagacatattaataccttttatacagttgactcttgaacnacattagtttgaactgcgtgagtacacttatatgtggatttttttcagtaaatggaatatttttggcgatggcaacaattttgtgaa

SEQ ID NO: 41 - DNA, 424 bp, homo sapiens
ggctgtgctgtgtgccaatgtttcgtttgcctcagacaggtatctcttcgttatcagaagagttgcttcatttcatctgggagcagaaaacagcaggcagctgttaacagataagtttaacttgcatctgcagtattgcatgttagggataagtgcttatttttaagagctgtggagttcttaaatatcaaccatggcactttctcctgaccccttccctaggggatttcaggattgagaaatttttccatcgagcctttttaaaattgtaggacttgttcctgtgggcttcagtgatgggatagtacacttcactcagaggcatttgcatctttaaataatttcttaaaagcctctaaagtgatcagtgccttgatgccaactaaggaaatttgtttagcattgaatctctgaaggctctatg

SEQ ID NO: 42 - DNA, 152 bp, homo sapiens
gagagtagagagctaatagggaaggagaagagagatgtcaagacacttacatgctgatgagctataagggaaagatgaaaggattcgcctgagcaagggatctagaagaatagaaatgtttggatttaagatttcgaagagaccagcctggc

SEQ ID NO: 43 - DNA, 159 bp, homo sapiens
  misc_feature (111)..(111): n is a, c, g, or t
tatttttgaggtcttatcctaaaaggcatctaaggtacatgaatggagtatggtgattttataacattttttatcagaatggaaaaagaactgtttaaaagtttgatactnttaaatagttggtttttttgcttactctggtaatgattttctacaaat

SEQ ID NO: 44 - DNA, 422 bp, homo sapiens
  misc_feature (29)..(29): n is a, c, g, or t
  misc_feature (194)..(195): n is a, c, g, or t
  misc_feature (339)..(339): n is a, c, g, or t
cccagtctcatttctattctatgaatatntccatacatttttcctttcttgtacaccctgctctcttagccaccttcttgaaataatcgactgttgaactgttagtacttccctgaagaccaataatttccagattaatcgtgtttactccgtggatcactattataagtaatttaaatggatttctactaacnntgtgtgtgtgtgtaaatactagcaatactagcaaccaccattctttggtatgtctttgttaattttcttaagagttagtagagaattttgtcccagtcttactttctgtatcctatgggagatgaactaaactgccttattcantctaatcacttcatttgaaattcagtaagcctctctaatttcaaacactggcatcagcaagtcggtgagcatttgtgagcaca

SEQ ID NO: 45 - DNA, 397 bp, homo sapiens
  misc_feature (308)..(308): n is a, c, g, or t
  misc_feature (328)..(328): n is a, c, g, or t
actcaacaccagagagctcatattgatgagaaatcttgtgaacataaaagaatgtgtgaagaactttcatcatggcctgggatttgctcaacttctgagtattcatacttctgagaaatctttgagtgtaaggaatgtggggcgttttatagccacactaaataccttagagttcggagaagataattcttgtgagaaagtctttgaatgaggaatatagggtagttgtcatgttcacaatgtactccctatgaaataatttaccagatacaggcatacctcgctgaattgtgcattgcagttattgngttttatacaaactgaaggnttgtggcaaccctgtggtgagcaagacgatcaggtccattttcccaacgtcaggtgtgcatttcatgtc

SEQ ID NO: 46 - DNA, 422 bp, homo sapiens
atgactggtatgatagctcttgacaaataaggaaagcactgaaatgttgtgattgggtctcgggaaatgctcagattgatgtcttaccagcatttcttctgggcttgtgatgttgagctgtagtcttgtagccataatgagcaaattgactaagagaagcaaaggtttcttggggttattaaccagtagtgtggaaatactagttttatgtggccaaggaaaagcaaagccttttcttttcagtttgtgttatttggaagacagaaaaacatcttgtctacatcctttggctgtttgtaggatcacgttgtccttacgatactgaaactttacagctgctgtaaattttttataaatgaatttcaaaatgttataatgggactgtaggttgtttttctacatcttcattatttggacctaaa

SEQ ID NO: 47 - DNA, 253 bp, homo sapiens
gatggagaattcactttggggaggggaaaaagaatagtatgcaagacccttattggcttttaattatacctgaaaccaaaatggatatttttagtctctctgcatgtgagatttggtgtaacaagatagaactataatatatacagtatatggaaggatagatatagtgctttgttcattttaattgcaaagctgccaaaatagttgaagcttaattacttgacttgccttgatttataggactggggcttgg

SEQ ID NO: 48 - DNA, 444 bp, homo sapiens
gactaaatgtcagcccagggtatagtaaccatgacacagtactatccttggtgaagagttgggaataggattaattgcggaaaaaatatatataaatgccataggacacttttagcacaaaagtagttgtttacctcccattctcctcctttaatctcagtgcttttactatttggtttcttttttggcattttacaaaagggaagaaatggaaaacataccccttcttggtcattgggtaacagcaccatttcggtaacagtcatacttgatgacaagtatgatgatattttaaggacatgaacatgggtgaaatcaatgtgtagatggtacaaattaaccgaattctttttaaagcatttcctgtggatcccaggatcatgaggacataacagaagaataaggtctgaatcttgttcaccagtttgctctcagcctaattgg

SEQ ID NO: 49 - DNA, 395 bp, homo sapiens
tggagtaacaagttccctatctcccatatttatttgtccatagtaaaatggccacattgatgataatttctagaactagtttctgagattgtcagccctttgtctaaaataatggcagtattaatgattgacttctgtcactgccatagttacctggattgtcagccttggtagcctttgtctaaagtcctaaagagttccaaaaaaaatgtgttgaaatttaattgctaaatagtggttggtgattctttacagtaggaattgtaataattttcttgcaaataagttatttactgctattgatattgaataatttgtcttttattcagatatatttcaaaaagcatgaatatatgattattcataaattgtatactttaccagtaagttttcag

SEQ ID NO: 50 - DNA, 488 bp, homo sapiens
  misc_feature (382)..(382): n is a, c, g, or t
gctatttaaagtctgagtgcgttggtaactgattcagtcatctgtaggttgaagtgattacttttatctgccttcatagtgagaattagatttctattctttgtaaagcagggaatatagattgtgcatggagtaaaagaattcaatccttattaataatgatggtagctgcgctgcagaaaagaaagcctgtcagagtaacttattcagttttacatcataatcagaggtgtgtccatctctgttgaaggcagaattaaaaaccccttcaacatttttaaaataatagatgaaaaacatctcaaagtctcctttaaaatttgaattgacgattccacataaaaggaagggaccaaaaatatcttaaagaaatacttcacgnatggaagtgatgttttaagtgaaatttcatcaaggagaagtttttccaaaaagtatttttacctcaggaagaatctcattagtttattctgtaaatagttcctagt

SEQ ID NO: 51 - DNA, 454 bp, homo sapiens
  misc_feature (123)..(123): n is a, c, g, or t
  misc_feature (228)..(228): n is a, c, g, or t
gaatctactgctgctaaagcacattaaaaacaaatcctggtttttaatgtatgcatagtttcatatttaatgaatatgctttcattaaatagggaggtagatttgaaaaaactgttataaagnaaatgtgccttttggggaatgaatacttttgttcatgtctagcccactgggaattttgttttcaccttatactgagtcctttttctaatgtaaaaatatttcttnccaagtttgatttctgtatcagggtaacattgagaacacacatatttctgtttgaggatttgtgacttcctatggaaacagtcttgcatctatgtatttacaaatgaaatttaaagtattcttaaagctttgccttaaatactgcttgcatactgatttacttaatgctaagcatggcaggggttataaatttaaatactataagacctggctgaatcccagatgt

SEQ ID NO: 52 - DNA, 430 bp, homo sapiens
  misc_feature (32)..(32): n is a, c, g, or t
  misc_feature (35)..(36): n is a, c, g, or t
  misc_feature (57)..(57): n is a, c, g, or t
ctgatgataaagtctagtatgcataatagganttnngaggcatttcaggaattttcnttttatagtatgctttttaggcatctgtatgtgtaatatcatagtatcatttattgctgggatggatcgaaaagcactgcttttacttttctgataagtatcaaaatgattttccagtaccaacttgactggcttttaattattgtcacacacacacaaaattcaactcctcaaggtttgggaaaattgtgtatttttttgtatacaagataaaagtgtcataaaaaggaatggatgaattgttgataggaacattagcagttaatttttacctgatactgagtttactgtaaaataggaaatgcataggaaggaatacctcctaaataatatgccttatagaatgatgaaatcttaccatagttcatactga

SEQ ID NO: 53 - DNA, 346 bp, homo sapiens
  misc_feature (67)..(68): n is a, c, g, or t
aaacacgagctatcagttaatctgtataaccaatgccaagtttcattacctctcttgtccaacttcnncatcaagaaaatgagcatagccacatctttttttgccttaaggggagaggcagaattctaacaatcataagacatgattcctgatgtgtgcgtgatccccactgaatctgagagtcaagcactgttgcctcggtcatacaacatgtatgtgttgatcctgactttgcaccaggtcctattctcaccccagtggagaagttaaggctcagagagttaaggagtttgcctaaggtcacacagcacagaagagtcagtaaattcatttgctggcgggacac

SEQ ID NO: 54 - DNA, 468 bp, homo sapiens
  misc_feature (369)..(369): n is a, c, g, or t
agccatgtttactggggtgatagttgttattgtggttgttattgttctttaggggtaggttcccaatatgtggtctttaaataattatctaatggtgtttaaaaagatgtttattctgtttgtcaggtacaaagatatttatgatacatgtatgacttgtctaagttattaacattttctctagccttaggtaatgcatgaaagcacatgtttcagtgccactcacataagaagtgcccggtaagtgttagctattattgtctacttgagttactactttctaaaagtatgttgaagtctttttctgtaattgcagatttgttgattttgcatttgagtattttctatattttgaagctgttagatgcntagtcatgatttttggtggaatgttttatcaatttttgaaaattgcctttgtctcatataatgcttttcatattgaactatattttgtctgctattaaa

SEQ ID NO: 55 - DNA, 280 bp, homo sapiens
tccaatagttacgaacaatgggctaacaggcgtgggtgtttctccaaaaattattcatgcacaaggcagcccaaagcttcagggaaaactagaaatgtgttatggattagaataggactgttttaaaatgctagtaccaggtggaacgctatttctgcaacaggactctgtccatttcctttggaacaatatattccaagtaaaatggctcttccaaggaatgacacctttacttgacacccttcggcatacaaatgattttaccaatagccatgattat

SEQ ID NO: 56 - DNA, 376 bp, homo sapiens
tttctcagttctgtatgcacttttatttaacattattcatataattctccccccaccactttatttatagatactgcccaagtgagaaggagataatagatactttgctctgaatttggcatccagagtaacatttctcccctcactcccttgctggtgtcatagttattagaatcagcagcctcttaactaattgcggtttcatggatatataaatgtttcaagccattattgctgaatggttctttagttattaacctagacccaattcaaagaccagttggatttatgatattttttatttgttcttgcagccaaagtgccagtttctttaatatgtgaccaagaacacaaggagcatccatatggccaaata

SEQ ID NO: 57 - DNA, 387 bp, homo sapiens
  misc_feature (41)..(41): n is a, c, g, or t
gtggtcattttggggcagttgattattttgcagaaagcagnttccttaccttcttgatttacaactgatggatttgtcataaaatgattttcaaacactgttatatcagagcatcagtatgtgttcagaagcatgtcctactttggccctatatggcaaaactgatgactgaaatgtaatttctgaagcatctatgttagggcctaattgaagacagtctaatatatagattgtcaacaagaattagggggaaaagaatttctcagttgttttactttaccatgctcattacctgtgaataatccctgacatgcattgttgctctgagtacccaatctggaagatggtcttagcaaaagtgagctaattccctatatttcatttgct

SEQ ID NO: 58 - DNA, 510 bp, homo sapiens
gaaatgtgactttgtaatcccaggaaaagggaagaatttgcaccaagaagttactgttacctcagaatggcaagagcatggatggctcttatcatcatctttatacttcttttacatttcctcattttttaaaagttttgtgtacatattacatttaggaaatccaatatatagtattaaaacagaaaaagtaaagaagcaggctgggcttggtgcccactactcaatttgactggcttaaaaaaataattttttaaacgacatgtacggacagacataatacttgcttctgagcctcccagtctttcaaaaccacattagggaataagcagtatttgcatggttccagtgatatctgggagtaagtgaaagtaatgaaaacacagaagtaaacacaaagtaattatagttcacctttatacacacgttaacagaaatcatctgatcccctttgctgctaagtgagttgaaaagcgaaagcgtctgaatcccaccagcatcgctggatgt

SEQ ID NO: 59 - DNA, 404 bp, homo sapiens
tacatggtgatgcatttcagcaattataaattaatataaatgaccaaaagtaacttaaaagcatgagatatttgctatttcattcattgggcacatatcaaattataattttgattttaaatggtcacccatgtatttgttgccaagcaagtaaaaaaataccctaacaaacctgatgtgggtgggaggggcatgtcagtaagtggtgtgttcaatgtgtttgtttcatatgggccctttccaggagtttgcaaaccttgtcatacccatatgcaaaactgtgtttccttgcattaaaccagtgaagtttgggttctcttttgtgctatcaatcagttgtaaaatcagagcttcttatatattctactggaataactgcatcttccactcagtcactacaaaaa

SEQ ID NO: 60 - DNA, 420 bp, homo sapiens
aaggatggtcgttttcagtctgaatgggttggtccttgtgtcatagactatattacagaaagtggatgtgctgtcctgagagacaacactggggttagactgaaaagacctatcaaaatgtcccaccttaagccctacataagagaatccagtgaacaagaaagtctttatctcttgcaaggttcagtagtggcagatcatgactacattggattgcctgaaattccgattggagcatatcaagcaaatattctggtggaagatgcaactattggtatagtcgataatgaattactgacatcaagcaaggatcgtgaactattagaatatagaaatacgaaaatctctccattgatagacgatcatagttctcttgaaaagcagactttcagtctgttggactcttcaaaccaggttctt

SEQ ID NO: 61 - DNA, 467 bp, homo sapiens
ctaagagttctatatacccctggccacactgatgatcacatggctctactcttagaagaggaaaatgctatcttttctggagattgcatcctaggggaaggaacaacggtatttgaagacctctatgattatatgaactctttaaaagagttattgaaaatcaaagctgatattatatatccaggacatggcccagtaattcataatgctgaagctaaaattcaacaatacatttctcacagaaatattcgagagcagcaaattcttacattatttcgtgagaactttgagaaatcatttacagtaatggagcttgtaaaaattatttacaagaatactcctgagaatttacatgaaatggctaaacataatctcttacttcatttgaaaaaactagaaaaagaaggaaaaatatttagcaacacagatcctgacaagaaatggaaagctcatctttagtttcagat

SEQ ID NO: 62 - DNA, 214 bp, homo sapiens
  misc_feature (128)..(128): n is a, c, g, or t
ggaaaacctttcgacttgtggctatactattcaatatggctgtatagctcattgtgctttgaatacgttggtggtgttgtcatgtgttctggaccatcaatggagcctacaattcaaaattcagatantgtctttgcagaaaatcttagtcgacatttttatggtatccaaagaggtgacattgtgattgcaaaaagcccaagtgatccaaaat

SEQ ID NO: 63 - DNA, 530 bp, homo sapiens
tctggtctttgaaaagaccgtgctgggcgcggtggctcttgcctgtaatcccagcactttgggaggctgaggcgggcagatcacctgagatcgggagtttgagaccaagcctgaccaatatggagaaaccctgtctctactaagaatacaaaattagctgggcatggtggtgcatgcctgtaatcccagctacttgggaggccgaggcaggagaattgcttgaacccgggaggcagaggttgcagtgaggtgagatagcgccattgcactccagcctgggcaacaagagcaaaactctgtctcaaaaaaaaaaaaaaatgatggagctccgaatgtgcttaagtggaaagatatctatgaaatatggtggttttttaaaacacaaaaattatagaatatgggatcccgtgtgtgtgtgtgtgtgtttgaatgaaaaatgcttatgtattgacagaacacttctagaatgatacccaaactcctggagtgggagtggggaatgccttctacgtacacactgttctactgtt

SEQ ID NO: 64 - DNA, 474 bp, homo sapiens
  misc_feature (226)..(226): n is a, c, g, or t
  misc_feature (434)..(434): n is a, c, g, or t
gatgtcagaccgttttggggcttagttagatttgaatatattaggaacattaactttttaaataaatgtaatttcctgtctttttgatcaatggggggagggcagctgtgcctaatttaggattgatttattctaacctctcttactaaataaatgcttgtattcagagtctgtttggaatttaacccaatgcttagaactccttaaatatacagaaatatatttnaggggtaattgattcatggaactctcctactttggagcacaattgtattataattgtccggaaactggccagataatgtagaacgcacaagttgttgagaagcccttttgtttcctgatagttacatgtaattccagcagtatttggaaataatttgctaagatgttagaatgtaacatttgaagacttgttagaaaaatcaataaanttatctttggctaatgggtagtacacatcttagtctgttt

SEQ ID NO: 65 - DNA, 556 bp, homo sapiens
  misc_feature (334)..(334): n is a, c, g, or t
gaaggcttcgctttgtgatttgaaacaaggtaatttttttaaattggctttggtgatgtgtattggaacaccattgttttcagcataattacgcatttcacagcttaattcagccattacacgtgatgcagtgtttagacatagcaataattacaaattgtacatgtttacagatagatataccgctgatcaaaataaaacagtggcagcaagaatgatgttctgtccatgtaagaaatcaatgaaatataattaagaacgaactgtatctcattgactcaaaacattgcatctgcctttctgtcccatctgttttctaaacaaaaatcttccngtgctgcgtggttgtttttatttgtatcctagaaccatcctctcgagttccacaccgttgtattttctacacctaagcttggtgtgttctgcacaggaaatgtttcttggatgttttatcctcataccaagtgggaatttaaaatttaagagattacccacactctttgcctttctgtacatgtgatgaagaaagagtgggtgtaacccagcactctaaaat

SEQ ID NO: 66 - DNA, 538 bp, homo sapiens
tttaatgtaaaccctctccttgatcttttttatttttaccaatattctgacgattctgacatgtttattttaccagatgaattttacagttaatagattcttcccccaaaaatatattgagaatttggttgggattctcttaaattgatatgactgtgaggactacagaattgcattgctttccagaaacatgttgccttgtttctgaaaaactttatatatccttcaagagagttttacttaaatcctatataatttgtaataaatatgttcctaggtaatacagacatacagggaacacgttgatactgcttattggagcttttaatatgttacctatgtggtcatttttgctatataggagaagaatttatttgcatcgattattttaaattggcaatttattgaaatctattaattttagagatattcatttgatccttttgagtttttccaggtgagaaatcctatcaattatgttataattatatgttttccttttcaaaatttataacataatttctgactgcatgggtta

SEQ ID NO: 67 - DNA, 399 bp, homo sapiens
  misc_feature (119)..(120): n is a, c, g, or t
  misc_feature (145)..(145): n is a, c, g, or t
gaaggatgctgaggacctagatgagaagttacctgcaaaaggcaaaagggttacttagtgtcagaaccaaggcaatgacttctctctcccagatctcctagctactggtcctgggccanntttttttttttaaataatcccaacntttctttaaaagacaagcatttcagtaagctagttattttcatgggttgctcatccatttttttcagtgatctaaaaatgtagggagatggctactactgaagttgtctgtctacttgggataatagcaaattaattgaagacaatgggaaagtaagttataaaaaatactgggaaatctgtttctcttctgagcaagcattcagggcaggtataaacatcaaacatagtgacattgtcaaaacctcttccatt

SEQ ID NO: 68 - DNA, 520 bp, homo sapiens
agcttatgggtcaaggttcagtttttaaaatatggctatctaattgttctagtaccatttgttgaaaagattgtttcttttttattgcattgcttttgcacttctgtcaaaaaatcaattgattatatttgtttgggtctaattctgggctgcctattctgttccattgttatccattcacaaataccacactttcctaatcataggaagtcttaaaattagatagtgtgtacaacttcgtccgtctcaaaaatcgtgttgattactactttgcttttccagaaattttagaattgttgctttctataaaaaattctgctagtatatctgttgagttagaactatagatgaatttgaagaaaatttacatcctcacaatattttgtctttaggccacaaacatgatatagctgtatatttattttggtcttgcttttttttccactttcagcatacagatcctggacatattttatatttataccaaatattttatatattttctactgttgtcaatggt

SEQ ID NO: 69 - DNA, 352 bp, homo sapiens
agctacttgatgtaactgagaatttgtgtggatatttatttaaacaaatgtgtaattttgagtacagaattcaacagttacctccaaaaaagaaacattgttaatataatttaacagaagttgtgaaactaaaattttctaagattaactggtagttcattgtaaatgaacataatgaacagaatttatgactccactgtggaaaatgctatcaaataactaaggaatatatatggaataagtgtacatatgtaaaatattgttactagagttagatatgtgccaaagtccatttatcccaaatcctgtctgaaaaggaggggtacattggtaaacattttggagtgcttaa

SEQ ID NO: 70 - DNA, 479 bp, homo sapiens
  misc_feature (39)..(39): n is a, c, g, or t
gtttgactacccttatgttagccacatctggatgagaancagttacaaagagtttggtctctaagttgatttgtacccagtgggtcaacttctgcaaaattccgtaatggtgtattagtattagaatagtgaataaaatgggaaagttatacatgtatacttattatcttgctcagtattttatctcacttgttctagaattttctgtaaaccctgctactgggtttgaagagttttagtcatcctttaacaatttttaaaaatttagcttctagattccatttggtaaggaaatcaatattggaagtattgctaaaatcttataatatgaaaagagatccactaatgtagcttaaggttattagatttgggcttttaatcatggaataatcttatgtattggtgtaagagttgatgaatgactttagctgtgtgaatatataatagtcaaactgcaaacattttgcatcccttttgtg

SEQ ID NO: 71 - DNA, 256 bp, homo sapiens
aaatccagccggactactctgcagtccaagtcggagtccgaggaggatgatgaagaggatgaggatgacgaggacgaggatgaagaagaggaagatgatgagaatggggactcctctgaagatggcggcgactcctctgagtccagcagcgaggacgagagcgaggatggggatgagaatgaagaggatgacgaggacgaagacgacgacgaggatgacgatgaggatgaagataatgagtccgagggcagcagct

SEQ ID NO: 72 - DNA, 493 bp, homo sapiens
taaagcctaccagtgtaacctaccagtacaactgtgaatcctaggcgaggcaaaaatgcacttccactgaaacgaagcatttctgaccgctttttcttggttatgaatcttaatttcgaatataagatgataggtaagcgcagctttcttggataatctgaattcccaagtgccaggagtaggatttcattataaaattaatagctaatcttattctatctcctgaagatttaattgctattgttacccattcgaaatcagctgtactgtgtgaacgaaataaagacaataatacgaacccctctctggctgcacggtcgcttatggcagttccacacagtagttggcgcccaatggggggtccctgagacttgcatgtaaaactagtctagatgtcttctttttttgtaagttttatttttgtaattgtgcatgtaaagcatcattgaatcaatggatctgttgaagaactcagctgctggaaaccatgcaa

SEQ ID NO: 73 - DNA, 377 bp, homo sapiens
tttaaagtctatatcccctaagcggagttgttgtttttctccctaatctatcagctgcactacttgagaaaatttaaagtgtttctagttaaattatttccttcttgagcgatctaatgtttcttgtaatattgatgatcctactaattatcctgctgttctttaattaatgcttaatgaataatatggcactgtaaaatagcttctcaacaagggaagttaaattttgagacttttttccccaaaggatactgactgtaatacaattaccaattcacaatgataaaaatattttgaaaggttaattttatactgtccacctatctatatattcttctactgaaatgattttgatatctttggctttccggtatcta

SEQ ID NO: 74 - DNA, 525 bp, homo sapiens
  misc_feature (145)..(147): n is a, c, g, or t
  misc_feature (150)..(150): n is a, c, g, or t
tatctcatgctgtaattcttggaaagtatgctgtagctcaagtgcagaattctcatcagttttatctttatatctctcctaaacactttacctgatgaagagcctggcatacacataaatatatattgaatgaatcagtgatggnnnganaagagaaatgatggatctcctaaattttaacttttataaaatattttgatacattcatgaccttactttagcaagcaatgaacgtgatgtaaactattgttgatatagtttttatattggaagtgtaagtagtttgtggcatgggattgtgacatatcctaggtttcctcatcttctttttattgaaatgtaattcacaagccataaaatttgcccctttaaagtaaatgatgcagtggattttagtatatttacagagttgtgcaatcatcaccactatctaattccagaacatttccatctacctagaaactccataccagtgagctgccactctaatcctcctcttcccccagcctctagaaacaataatcc

SEQ ID NO: 75 - DNA, 318 bp, homo sapiens
tggataaggaccagtacctgcccaggaaactggtgagtcttattctgtctctaatgcagattttgttgaatagagcattgcttagcaacgttagggcagtgactgtggaaatggtggcacacctgtgtggtaggtttgtacacagccgttttcaatgatatttaaaaagcttttcttcataaatggaaattcaccatcttgttacctagaaagcaggatacaaaattacatgacacatagtaatctctaaggtgcaaaacacacgtggaaaaaagacagaagggaaatatgctgaaacgttgccaggagttttctctg

SEQ ID NO: 76 - DNA, 510 bp, homo sapiens
caggatctcctgtgaagtgcttcttccccagttgaataggagctggtgtttgtctaagcctctgcttatgcatgaggtataatgctttttatatgttatataatgctcttacgcgttagctatctgaatgatagatttaataaaatatacctcataatattatggggaaaggatgacgactgttatagagaggaacttgggagtatcacttctgtaatccttatctaacctgaatctgttagcaggaaactgaaaaggcctgtgtatgacaatgagataaacaattttaatctcttagcaatgtcaagtggaaaatctaactacctgccagtagtttaagaaatggctaagagattttgttgggcacaaataatcctgagacccagattgctgagccaagggtaggaaaattggttttgctatgtgttacagctgggaagtgagaaggtcactgtttgacaaactactaaaaaaaccttatggattaaacattcgccagtgtaggggaca

SEQ ID NO: 77 - DNA, 296 bp, homo sapiens
gattaaacctatacaagtctggcaatgagctctgcatgaggaaatggaaggaggaatattgaaaatgattctaggaaagtgaacgtaagaaaggaaaatgggttttccttttctgatcatgggctctggaaagtattcatggcctttaccagcattcagtataaaccagagataaggacatatgtacttacgtgtgtctgtgagtgtgtgtgtgtctgagtgttattctgaacagcttgtaaatattgtagttgtttaaaatggaaaataaaagctgagttcttttggcaaatata

SEQ ID NO: 78 - DNA, 443 bp, homo sapiens
tctttattgattagcactgaggattttaacattgtgatatattatatatttataatttaccatctcttgatgagactcttatttctttatataggtcagtcttgcaagtaccattttataagcagctgtgaaatttaagtgaaatgttctttgtaaacatttgtactattttaaatgaataatgaccttatgaagtatgctatctgtaggctgaaattataggtacatctgttttcactatatgatattaagaaagcgtgaaatgacttaaatgttcatttttttctgtatagatactttatcatgttttcatgattttaggaattactgctttgttgatattcaaagtgtgaaactaaaagtttatggttgtactttaattcttggcatgttgcctctatgtcccatttaaaataaaatacattctcattaactttagatgg

SEQ ID NO: 79 - DNA, 543 bp, homo sapiens
gaagtgcgccaatgttgtcttttctttccacgttatactgtgtaaggtgatgttcccggtcgctgttgcacctgatagtaagggacagatttttaatgaacattggctggcatgttggtgaatcacattttagttttctgatgccacatagtcttgcataaaaaagggttcttgccttaaaagtgaaaccttcatggatagtctttaatctctgatctttttggaacaaactgttttacattcctttcattttattatgcattagacgttgagacagcgtgatacttacaactcactagtatagttgtaacttattacaggatcatactaaaatttctgtcatatgtatactgaagacattttaaaaaccagaatatgtagtctacggatattttttatcataaaaatgatctttggctaaacaccccattttactaaagtcctcctgccaggtagttcccactgatggaaatgtttatggcaaataattttgccttctaggctgttgctctaacaaaataaaccttagacatatcacaccta

SEQ ID NO: 80 - DNA, 397 bp, homo sapiens
  misc_feature (260)..(260): n is a, c, g, or t
gcaacaaggctttgttttcttggggagggaaagatctgttccatttcacttactgttctgaggagggtttcaaggttctgtgtttaaagtcaggatttacctgtctgtagaacataaagtgaacaaagtttgaatagtttagagtaagctagccttttgcacatttacattgacatgtttcttcttgaatttggactgttgcagcatatctatgatatggtattcagtgtcattagtgaaatcttatttttgtttctgtnaaaaaaaaaaatacatatatatatttatgcattgtgaaaaatgcagtccatgatgtaaaattgtacatattccagaatccctaacaacctgtactaaatatatgtacaaagaactatgctgtcttatttatgttttg

SEQ ID NO: 81 - DNA, 523 bp, homo sapiens
tggtaaactgatgaaccccgaccctgatcaacatgagatgaccgccgtgtggtaaactgatgaaccctgacccattaggctttggctacagaatgtggaaataagttgtgttactacatgtgtgtaatcctagggtgcaggacaccggccgggaggttccatagagtgatgggttctgcaggtaactcatcctctagtcctctgtaagctcctagaaggaagaaattatgtcctttagactaataaaattcctccaaaccaaatacagcacctactgtgaagacacaaagatacttttagatagtaaaaactttatccattgagaaattccttaatgaaacagtatccaagaagtcatttgccagcagatttcttagaggtgcgataaagaagaggacattgccagtcgtcacagcagctgcaatagctcctctctattgttaaacagtgggatatcttgtgcaggttttcagttgacaatcaattttaaagattagtttcggtccccatcaatcaattattt

SEQ ID NO: 82 - DNA, 522 bp, homo sapiens
  misc_feature (104)..(104): n is a, c, g, or t
  misc_feature (107)..(107): n is a, c, g, or t
  misc_feature (109)..(109): n is a, c, g, or t
  misc_feature (111)..(111): n is a, c, g, or t
  misc_feature (124)..(124): n is a, c, g, or t
  misc_feature (128)..(128): n is a, c, g, or t
  misc_feature (130)..(130): n is a, c, g, or t
  misc_feature (137)..(137): n is a, c, g, or t
  misc_feature (139)..(139): n is a, c, g, or t
  misc_feature (146)..(147): n is a, c, g, or t
  misc_feature (163)..(163): n is a, c, g, or t
  misc_feature (297)..(298): n is a, c, g, or t
  misc_feature (302)..(303): n is a, c, g, or t
gacctaaagtcacaatcttcttctttgctgctttttaaaaattacctattacctttaaaagatcccaaatttagaagaggaattaaaataaaagttaatgcaanaanananttccacaatattntatnanttcaacntntaatcanngaaaacattaatggantactcttactacgcctggtagggatgtgtttgggacataaaacagtttaaaaccttcaaaagacaatgactcaatattttcttgttagacaagtactattagcacctacagcacatttgaaggtctaatggcanncttnntgaaaagcattctgcatttcagcattattttgacctgtacattacacttttcccttccctcatcttagtgaagtagagagattactgatctatttctttatcttaatcattcctccctaaccccaagacaaagaatacaaattagaatttacaaaatgtattgtgcccatggaaatacatagttttgttactgtactcatagatatttactacccttgt

SEQ ID NO: 83 - DNA, 372 bp, homo sapiens
aaattctaccacaaatcagcattcaacagccatcagagaattcataggagaggcaatatgaatgtaatagatgtgggaaggcttctctgaagtcagacctcattttatatcagagaaccctttcagtatagtgaatcagaaactcctgcctgaagtcaaacaccttgtacatcagagagttcacacaggttagtgtggacatccccttgtgtgttggactcataatctgaagactcacagaatggaaaccatgattataacaagaccacatggtataacaatactagactatagacaagtaaaaatttataaatattaagaatgtatatacatgtcaccatggattggaactgttttgcatatcagggaaat

SEQ ID NO: 84 - DNA, 399 bp, homo sapiens
  misc_feature (209)..(209): n is a, c, g, or t
gttgggcaagtgccttgggttctttaaatgcaaagtggggataataatagtacctacaagatgggtttttataagaagtaaatgaattggcatttagaaagttagaagagtactcagtgcataattatgatccaaaaagtattaaataaaaatgaagttctctttcctaatggcacaagtggtaacccctaattctctagcctgcaggnctgaaggctcaccctctacttggtttaatattgatctggaaggaggcagtttcagatagaatctgtatgtggattttgctgtattattgttggagtaaagttgacaaaatctggattttggctttcagtatgggtacaacaatggcaaattatccaaaagagctctatgttgaacatgtctttttatctc

SEQ ID NO: 85 - DNA, 309 bp, homo sapiens
  misc_feature (38)..(38): n is a, c, g, or t
  misc_feature (61)..(61): n is a, c, g, or t
ctgcaagtagtatcagcttcaccataagcttgggcctncctccatcttgttttatttaagnctctttaaatgaaattttgttgtcattgtttcagcattcatgaactttcttactatcacaggttctactttaattttccttgccatatgtgtttccattttgtgggacattagccaccacaggaacacaagagttgtcagaagactcctgggtgtacagagcaaatcaagctgcatcagtattataggataccaaacagaatcctttctattaggaaataagaaatcagttaagtgttggctgggcgc

SEQ ID NO: 86 - DNA, 537 bp, homo sapiens
gacatttgttgtgtacctgctgcaagtcaaatacatggcatggtattgtttccttgttcacaccacagcaaatgagaaaatgagacattatagccaggtgtggcggcacaggcttgtggtcctagctactcggaaggctgaggcaggagaattgctccagcccaggagtttgaggttacagtaaggtatgatatcaccattgcatttcaacctgggcaacagaccctgtctctgaaaaaaagggaaaaagaccttgtgagctgtctacgtgtactctatgtctcaggagactcatatcctgtaatttttctaaatggcgtctccatgtggtctttcatgaatgtttgtctggattctctatccttttactttcaacttttctttaccttctactgaaattatgtcttttgtaaacagcccatgattatttatttagttatttatttttacccccctgcactatttgtcttgtaattggagtgtctgagtccattatgtttaatgtaattattgacctcattgggtttaagtctgtcc

SEQ ID NO: 87 - DNA, 530 bp, homo sapiens
aagtgtgcataatttcatttaacgttaaagaaatagatccaattcctttcttgcaaccaaaaataaataaaatacgttgcctcaatataaggtttgggctattctgtgtttctatagaagcaatctgtttttggtaaaatgtacttttaaggatccagtcatctgaagtattttatgtagagttagagatttcacaatattgactatacatatatttaaaatataaattatccagctgatgtttgaatttgtcttactttcctggccacctcgttgtcctattttataagctggggagttaactagcttaacaaaagatgcttagcttttgtaaaagaacaagtgtttcattttacaaagacactccaaatgatagttacttgattttctcgagacctttaactatggtgatgaataacaggacttgctttcaagccttaataaatgtaaaatgccttttaatgaagatacagctgagtgttttcctcatgaatctgaaccaattaccaatttgtgttccagtcttgatt

SEQ ID NO: 88 - DNA, 481 bp, homo sapiens
atacccttctcagttaaatgcggatgttcttatttgattaatcagtaaactttgataattgatgttgtcttaaaagttgtgatgtgcaatcagaagccatattgtgaactttatgtactcaatgacataaaatccattggtttaccttgcacttggaatgacttttttgcttttaaaacagtgtcattggccatttggaaaatattagttacctagattgtacagatctcctgaaaattgactcattttatcaaaccatatcaaaaaatcataattcttaatattaccactagtctcatcagataagtcttcagtattgagaagctgtcaagcttaggatggcagatgtatgttttccaaaatgctaatttttgcttgaaaactcaaattttatcattggcaacaagtgttgttttcctggaagtgacaggctcacttcattcatttcagtaatatatctgccaaatgctcaagtctgaat

SEQ ID NO: 89 - DNA, 466 bp, homo sapiens
gagatattcaggccaattcagttttggtgtcctggaaagcaagttctaaaattctcaaatctagtgttaaatggacagcctttgtcaagactgaaaattctcatgctgcgcaaagtgctcgaataccatctgatgtcaaggtatataatcttactcatctgaatccatcaactgagtataaaatttgtattgatattcccaccatctatcagaaaaacagaaaaaaatgtgtaaatgtcaccaccaaaggtttgcaccctgatcaaaaagagtatgaaaagaataataccacaacacttatggcctgtcttggaggccttctggggattattggtgtgatatgtcttatcagctgcctctctccagaaatgaactgtgatggtggacacagctatgtgaggaattacttacagaaaccaacctttgcattaggtgagctttatcctcctctgataaatctctggga

SEQ ID NO: 90 - DNA, 333 bp, homo sapiens
atagagtcgtccctcattatctgaggcaaggaggatttggaaccctcagatacagaaggctgactgtatttatatgttttgaatttcagactacaggacttttaaatagataggtagtggttgtatgtattttgggggcacaggtgatattttgatacatgtatgcaatgtgtaattatcaaatcagggtaattggaatatcacacatcttttctttatgttggaaacattcaacagttctcttctagctctttcaactatacaatacattgttaaccagagtctaagcactgttgttttcaatcttaccttcacacatgctttcagtttgtg

SEQ ID NO: 91 - DNA, 258 bp, homo sapiens
  misc_feature (211)..(211): n is a, c, g, or t
agaacccacagtgctgtccatagaggagaacaagcaacgaagatcatggctaaagatcttagagatccttaaaatgccgattcctaatctcttgctgaaaactactgacttttagatattttcccgcttgccactctgtaatccagaatattaggaacaagttcttaaactcgagtttacttttcactggtgtttgcatgtgtgggggacnaaagtttatgttcttgtggcaggaaactgtgggatctgcagcatgga

SEQ ID NO: 92 - DNA, 482 bp, homo sapiens
atttctttggcagttttcgtgctaatgtttttgctaaggaagataagctctgaaccattaaaggacgagtttaaaaacacaggatcaggtctcctgggcatggctaacattgacctggaaaagagcaggactggtgatgaaattattcttccgagaggcctcgagtacacggtggaagaatgcacctgtgaagactgcatcaagagcaaaccgaaggtcgactctgaccattgctttccactcccagctatggaggaaggcgcaaccattcttgtcaccacgaaaacgaatgactattgcaagagcctgccagctgctttgagtgctacggagatagagaaatcaatttctgctaggtaattaaccatttcgactcgagcagtgccactttaaaaatcttttgtcagaatagatgatgtgtcagatctctttaggatgactgtatttttcagttgccgatacagctttttgtcctctaactg

SEQ ID NO: 93 - DNA, 191 bp, homo sapiens
  misc_feature (119)..(119): n is a, c, g, or t
  misc_feature (143)..(143): n is a, c, g, or t
aatcatttgtaatcgttgcatcgggctgcactttgaggagacattaggagtaaatccgtggcgtggtaggcttatgctttatcttctgatatttactgagtttactggtgcatgaaaanctttcagcaagaatagcagatggnatggacctttcataggtaatgctatctaccaggttattacttctatat

SEQ ID NO: 94 - DNA, 419 bp, homo sapiens
ttttttccctatctgtatctatagcaacaacccagaacttacaaacttctccaaagattttattgattgttatatcaaatcagaatgtaaacatgaactcttgcatatatttaaaattgtgttggaacatttgaacatgaatgctgtttgtggtacttaagaaattaattcagttggattatcattatgtgatactggcagattgcagtgcaaccttatgccaataaaatgtaatttaacagccccagatattgttgaatattcaacaataacaagaaaagcttttcatctaagttttatgctttaattttttttctttttttttctttttcttttgtttccttggtactaattttaatttttatttggaagggagcagtataaagcttatttgtatttagtagtgtatctcatagata

SEQ ID NO: 95 - DNA, 291 bp, homo sapiens
  misc_feature (219)..(222): n is a, c, g, or t
  misc_feature (226)..(226): n is a, c, g, or t
aaaggtgggctaatgtggctttccactacagctcttaccagatttttttattttcagtgtgatttggctggaatattaataacagttggttgacatgtattcacaattgcatgacttctctttggaggctggtaggttgagtattgttctttttatccatcctttcccctcccctaaatgtcagtctttctgcttttaggattatatttgaattttcannnngggnttatacaccaccactggagagtagaaggccactaacttgcaggcagttaacttatatctttacaa

SEQ ID NO: 96 - DNA, 505 bp, homo sapiens
tttatcattttgtttgtcctggctaaacttggagtttgagtatagtaaattatgatccttaaatatttgagagtcaggatgaagcagacctgctgtagacttttcagatgaaattgttcattctcgtaacctccatattttcaggatttttgaagctgttgaccttttcatgttgattattttaaattgtgtgaaatagtataaaaatcattggtgtacattatttgctttgcctgagctcagatcaaaatgtttgaagaaaggaactttatttttgcaagttacgtacagtttttatgcttgagatatttcaacatgttatgtatattggaacttctacagcttgatgcctcctgcttttatagcagtttatggggagcacttgaaagagcgtgtgtacatgtattttttttctaggcaaacattgaatgcaaacgtgtatttttttaatataaatatataactgtccttttcatcccatgttgccgctaagtgatatttcata

SEQ ID NO: 97 - DNA, 469 bp, homo sapiens
gactttagttccttcatggtaatggcttgagtaacatcatctttgggattttttaaatactggtccagtctaggagaacctggaagatgaccagaggtatttcagtttccctagggagagcttcgttatccatgtggatgataagtctgcttgatttattattaaatcattatagcagtgaagtggtgccattttctctctcttaagccccatttgaaaggctagagaaggggatatatatactatgttcaaggtttgtaaggttgttaatgtacataattgcagattgcaataaaagcttagatacattttgtaaacccaacccactaaatgagcaggttacaagacaaatgtcaccagcctcaagtattttatgaactatttactgagggtagttatgttaaatagattataatgtggtaaattatttcctgaatcctttatcacaggaaaaacacagaccctcata

SEQ ID NO: 98 - DNA, 379 bp, homo sapiens
  misc_feature (137)..(138): n is a, c, g, or t
  misc_feature (148)..(148): n is a, c, g, or t
  misc_feature (152)..(152): n is a, c, g, or t
  misc_feature (159)..(159): n is a, c, g, or t
tttttttacaagcccacaacatcatagctttgcagtttttaaccaggagctggtggagatctttgaaatcatttaggccaattcttttagttacatttatgatgaaactagggatctaccttaaagttttgggaagnnctttcaaaancttncagacancctagaaatatatatagtgcagttcagttttagtttctgcagcatggtttggaaacaaaagatacataggatttaaactcgatttgttttcttcttacagtagaagtaaatgctcttgtggcttgaatcgcatctcccaagaaagatacgttcacgttcaaacccccagtactgtacatgtgaccttatttggaaatagggtctttttagatgcagtcaa

SEQ ID NO: 99 - DNA, 548 bp, homo sapiens
gtatcggaacagtacaacatctaaagagtaaatttggaaaaggctactttttggaaattaaattgaaggactggatagaaaacctagaagtagaccgccttcaaagagaaattcagtatattttcccaaatgcaagccgtcaggaaagtttttcttctattttggcttataaaattcctaaggaagatgttcagtccctttcacaatctttttttaagctggaagaagctaaacatgcttttgccattgaagaatatagcttttctcaagcaacattggaacaggtttttgtagaactcactaaagaacaagaggaggaagataatagttgtggaactttaaacagcacactttggtgggaacgaacacaagaagatagagtagtattttgaatttgtattgttcggtctgcttactgggacttctttctttttcacttaattttaactttggtttaaaaagttttttattggaatggtaactggagaaccaagaacgcacttgaaatttttctaagctccttaattgaaatgctgtggttgtgtgtt

SEQ ID NO: 100 - DNA, 531 bp, homo sapiens
  misc_feature (284)..(284): n is a, c, g, or t
agagtcactacccgagttattcgccggcgtttgattataaaggtatcctgtagctggatcattatgtggcattgctctactattagaaactccttccttgtggttgtagaaactccttccttgtggttgtgaaatttcagcatgcttgataatgaaatggctttgtgtaatttttttgcacccttgaaagcttgtaaaaacaacaaccaaaaagaaaagaagccatgttgcatggtattctgtataggcctatttgatatgtggcggttgtagttttatttganaattcttggcatttgtatcctgctttccttgaagaagtgttatgtgaatgagcaaagattctgtcttggtgacacagtagttcatatcaaatgaaatgtttaattgaaaccttagaaactgtaacaaggtatgaggcacgataaagaagaaagagaatgaaagaattaaaaggcttccttctcagtctcaaattcctactgccttaagaatttttaaattaaaaccagttcttcataagcaatcagt

SEQ ID NO: 101 - DNA, 539 bp, homo sapiens
  misc_feature (147)..(147): n is a, c, g, or t
aatgcattactttcacttaacactagacaccaggtcgaaaattttcaaggttatagtacttatttcaacaattcttagagatgctagctagtgttgaagctaaaaatagctttatttatgctgaattgtgatttttttatgccaaantttttttagttctaatcattgatgatagcttggaaataaataattatgccatggcatttgacagttcattattcctataagaattaaattgagtttagagagaatggtggtgttgagctgattattaacagttactgaaatcaaatatttatttgttacattattccatttgtattttaggtttccttttacattctttttatatgcattctgacattacatattttttaagactatggaaataatttaaagatttaagctctggtggatgattatctgctaagtaagtctgaaaatgtaatattttgataatactgtaatatacctgtcacacaaatgcttttctaatgttttaaccttgagtattgcagttgctgctttgtacagaggtt

SEQ ID NO: 102 - DNA, 286 bp, homo sapiens
  misc_feature (45)..(45): n is a, c, g, or t
tctgtttctctttaaagttgaagaatgatatatttaacaagagtngtgttttatttccagttttccagtagcatatatgtagatgcattgaggtcatactgtgagaaaatgtctttagggtatccctccaaaataggagccttaaactttttaacttaaaggaaggcatatctaaaaaccatagtggttgcttttaggtatagtttcctatataacctatagtcagacttatctataatatgaaaatttaattgttttaaaaatgcatacatcggccgggtgcagt

SEQ ID NO: 103 - DNA, 537 bp, homo sapiens
aaatctatttcaagctacaccattgagattaagtctgaggcagttcattgaggcagctctactataaaagcttacttgataaactgcctcagacttaatctcaatggcccaaacattatatagatttctttttttcagtcagaggccttatttgatattttataaataaatgacagtttttatttttaaactttttattgtttttgggaaagtattccttaatttaatgacacattcattcagatacttcttatccctgctaataaaggaaatctatttcaagctacaccattgagattaagtctgaggcagttcattgaggcagctctactataaaagcttacttgataaataattatttttgtaaacaagttgggttaacttattcttcgtctttttgcttggatatgaatttaaggtcttcatgtttaaagacatttactttgttatttagtgacacatttccatcctattttttttttttttttggttgttgttaaacagaaccttaagtttatgtttgaggtatgtactgca

SEQ ID NO: 104 - DNA, 381 bp, homo sapiens
aagaggccatcttgaatctgtagaataccatttacacatcaacttcaccctatgctcatttcgtattttgagcttaaatggagtcctctgaagggggggtagtcgtgattctggtggcaaaactagaacttttaacttgtaaaatgaaaaatattaaatggacctttttgtcagttgaggatttagattgattcttttatctgaggagcgtatgttcctcagatgttgcgtagagacctttaggttttcatctactttaagattgctctcttggcaattaggggatttgggaaaagaagaaaaaaagatgccatgtgttgctagtacacagttataggatatggtttctaatggttgaattttgaggaactctccctaaag

SEQ ID NO: 105 - DNA, 557 bp, homo sapiens
  misc_feature (67)..(67): n is a, c, g, or t
  misc_feature (77)..(77): n is a, c, g, or t
  misc_feature (82)..(82): n is a, c, g, or t
  misc_feature (88)..(88): n is a, c, g, or t
  misc_feature (99)..(99): n is a, c, g, or t
  misc_feature (102)..(102): n is a, c, g, or t
  misc_feature (104)..(104): n is a, c, g, or t
  misc_feature (110)..(110): n is a, c, g, or t
  misc_feature (113)..(113): n is a, c, g, or t
ttgtgacactgtaaatcctgaggtttatagaaaggattcatgactttgtaatggaggtatgttttgncattttttgnatttntggtcncatctcttggntgnanagtacntgnaaatcattatttccagatcctggaagaatctatagaaaataatccatcttaatgctttagagaacaattttcattattgcaaatgatcaagaatgagcattgttgtagactccattatcatttaaaaaatagttgttatctgcaaagtaagtacgcttcacataaggaatctgcataagttatttcttgtgtctattattacataactatgaacaaatttatgttatacaataaatttgatttatgagattggatgtaattttattaataccaattagtgttatatatttaatgtgcatattaatatatatttataatgttataccttttttttacctttttaaaattacacttttaagagactgactttaacaatcaagtatgagttgtttaattactcctggctttaacttttcaaagtagctttattggttttatggtcat

SEQ ID NO: 106 - DNA, 451 bp, homo sapiens
ctctcggttgtcatatctcactgtacattatagaactcattcaggagagaaaccctatgagtgtactgaatgtggaaaaaaattctaccacaaatcagcattcaacagccatcagagaattcataggagaggcaatatgaatgtaatagatgtgggaaggcttctctgaagtcagacctcattttatatcagagaaccctttcagtatagtgaatcagaaactcctgcctgaagtcaaacaccttgtacatcagagagttcacacaggttagtgtggacatccccttgtgtgttggactcataatctgaagactcacagaatggaaaccatgattataacaagaccacatggtataacaatactagactatagacaagtaaaaatttataaatattaagaatgtatatacatgtcaccatggattggaactgttttgcatatcagggaaat

SEQ ID NO: 107 - DNA, 491 bp, homo sapiens
  misc_feature (104)..(104): n is a, c, g, or t
  misc_feature (163)..(163): n is a, c, g, or t
  misc_feature (187)..(190): n is a, c, g, or t
  misc_feature (356)..(356): n is a, c, g, or t
aaatccatggagtttagttactgttgatctgatggggccttttcatacaagcaacagaagtcatgtatatgctataatcatgacagatttattcaccaaatggnattgtgattttgcctctatgtgatgtttcagcatcagaagtttctaaagctattatcantatatttttcttatatggacctcnnnngaaaataataatggaccaaagagatgaattcattcaacagaaagtctttatctcttgcaaggttcagtagtggcagatcatgactacattggattgcctgaaattccgattggagcatatcaagcaaatattctggtggaagatgcaactattggtatagtcgatnaatgaattactgacatcaagcaaggatcgtgaactattagaatatagaaatacgaaaatctctccattgatagacgatcatagttctcttgaaaagcagactttcagtctgttggactcttcaaaccaggttctt

SEQ ID NO: 108 - DNA, 416 bp, homo sapiens
  misc_feature (35)..(35): n is a, c, g, or t
  misc_feature (48)..(48): n is a, c, g, or t
  misc_feature (50)..(50): n is a, c, g, or t
  misc_feature (64)..(64): n is a, c, g, or t
  misc_feature (68)..(68): n is a, c, g, or t
  misc_feature (78)..(78): n is a, c, g, or t
  misc_feature (88)..(88): n is a, c, g, or t
  misc_feature (122)..(122): n is a, c, g, or t
  misc_feature (129)..(129): n is a, c, g, or t
  misc_feature (139)..(139): n is a, c, g, or t
  misc_feature (153)..(153): n is a, c, g, or t
  misc_feature (159)..(159): n is a, c, g, or t
  misc_feature (175)..(175): n is a, c, g, or t
  misc_feature (178)..(178): n is a, c, g, or t
  misc_feature (199)..(199): n is a, c, g, or t
  misc_feature (215)..(215): n is a, c, g, or t
  misc_feature (260)..(260): n is a, c, g, or t
aatcaccagacttctgaaggtgcctttgaggacantggagttctcttncnattctctcccttcntgcnaaaagatcgntgagacagcncagggtcgagtgctgtggagactatgagctgccnttctccntgggatgttngaagaatgagtatnggcttnaaggatgagaggtccnttngagtaaagaacattctgtgancacagcaggcagtccnacaagggttggggtttgaatgaagggggtggctgaggatcttccnaggcacctgtgttttgggattagccgtacttggaagcctggtggaagctgcttttctatttatgagtcaaattctctttcactctgaatgtaattataattgccaagcagctgtatcttaatttagggtcttgaatcggtaacgtttcctaaggct

SEQ ID NO: 109 - DNA, 159 bp, homo sapiens
gatttttgtggcatggattgctgtgctcactgctgtaaaaggtgacctagtgtactgggcagctggtggcggtgcagaaaagagtctcaggttattttttgtttttagttatttcttggaccttgacagtatctaatgactcctcctgaaaatgctgca

SEQ ID NO: 110 - DNA, 349 bp, homo sapiens
  misc_feature (89)..(89): n is a, c, g, or t
  misc_feature (97)..(97): n is a, c, g, or t
  misc_feature (102)..(102): n is a, c, g, or t
  misc_feature (104)..(104): n is a, c, g, or t
  misc_feature (113)..(113): n is a, c, g, or t
  misc_feature (126)..(126): n is a, c, g, or t
  misc_feature (138)..(138): n is a, c, g, or t
  misc_feature (142)..(142): n is a, c, g, or t
  misc_feature (154)..(154): n is a, c, g, or t
  misc_feature (170)..(170): n is a, c, g, or t
  misc_feature (175)..(175): n is a, c, g, or t
  misc_feature (210)..(210): n is a, c, g, or t
  misc_feature (234)..(234): n is a, c, g, or t
  misc_feature (255)..(255): n is a, c, g, or t
  misc_feature (262)..(262): n is a, c, g, or t
  misc_feature (271)..(271): n is a, c, g, or t
  misc_feature (276)..(276): n is a, c, g, or t
  misc_feature (292)..(292): n is a, c, g, or t
  misc_feature (317)..(317): n is a, c, g, or t
  misc_feature (320)..(320): n is a, c, g, or t
aatacttagttcaatgcctggctcatagtaagtggtaagtgctcaccatattttaatttttacatagaacatgtcttactttttcattngaaaaaangaaantngagttattncagtgggaagtantggttgaggttnaganggcttaatgacntacaccgggactcaantgacnccgccaaagggggcacatttgtttaaagggaagantgtgaacttgtaaagtttaggaantaagaatgtagctgggctcgntggctcncgtgtgaantcccngcacactgggaggccnaggcagggtggatcccttgagctcnggngttcgagactaccctgagcaatatggtga

SEQ ID NO: 111 - DNA, 414 bp, homo sapiens
  misc_feature (137)..(137): n is a, c, g, or t
agtttcctctttgcacatgtttaacatttggctgttataatatatggtcctcggttggggaaagatacttatgatgaaggatattttttaatttaacttttttttaaatattggtaataggtcggcaacagcaactntagaagtacaactcaatagatggcattaaaacatattgtagtgtggatatatattttttcttttttaaaatgtgatattgacgttttattaatattttttaaattgttacgtttataaatttggtacttaaggcacagccagtatgagacactgaatgcgacatttattataaagagctgctgcactcctatttttataaattttactaacaaagtagactaatgtagacattcacagacatggtagggcaaaagcatcttcaaactaaagactcca

SEQ ID NO: 112 - DNA, 361 bp, homo sapiens
atagatcacaaccagatgttccaatattttattacagttgtgccaacaaaactacatacatataaaatatcagcagacacccatcagttttctgtgacagaaagggaacgtatcattaaccatgctgcaggcagccatggagtctctgggatatttatgaaatatgatctcagttctcttatggtgacagttactgaggagcacatgccattctggcagttttttgtaagactctgtggtattgttggaggaatcttttcaacaacaggcatgttacatggaattggaaaatttatagttgaaataatttgctgtcgtttcagacttggatcctataaacctgtcaattctgttccttttg

SEQ ID NO: 113 - DNA, 325 bp, homo sapiens
tttctagggtactttatgtttcttgctccctaaaaagaaaaacaaattagttatataatagtaaattaaaattgtataatataagccctacatgggtatttgtggcaattcaggagtaattgctttatcatcattctgttcagaagtaattgcattgcttttggtgactgtagcttacatttagaattcagtcagttgggtcatatgccatttttataaatggagaatataatgccataaactgtaaatttttgaagatatatggattctgattttgctgaatattttaggttttttgtttgttgtaaaaactgtatttctacca

SEQ ID NO: 114 - DNA, 329 bp, homo sapiens
  misc_feature (74)..(74): n is a, c, g, or t
  misc_feature (82)..(85): n is a, c, g, or t
  misc_feature (88)..(92): n is a, c, g, or t
ttctgtctgttttggattcactgcttccattttacagaatgtcactctttagactctcagtccatcatgccatngggtactnnnnttnnnnngtaatttttattacatgcggttatttccctaacgatgtgctattcacgttcatcttcaaactcattttccatcagccagtgtctactatttagtgccctggctctatttcggtcctcctccccgggctttccctggctgctgtgctggccaaaagcatgggctttattctctccattggctgctgctccaccttagaggtgtgacctcactagcgttgactgagcgagtctgttgtg

SEQ ID NO: 115 - DNA, 548 bp, homo sapiens
aacaattttgccctgattactgaagcgtcaaataaagctggagtgaaaattttgttttgaaaaggtgctcaagctctgacatttttggttttcatagtcgtgaagtatttatcatttgcatgactaatggcacaggaaaaacctattcataagttttacaatcaagtatagaggggtcttcagctaacttagttatacataaatgctgaaaagattatcttgagctgggccttgggagaagaatttggccttcagaactgcaatatcactgagcctgcgatctatacaccaccccacattttgttggtttcacagtcttgtgcaagtaacctctggtcttacgtgtgtaactgagagaagagtgtgtgtttgtgtgtgcatgtgtgtttattgttcctaagaatttggcacaagtcagagataattgcctatactaagaatctatactgcagaatatagtgtatcaaaaacttttttcttttaaattattaaagtgtcttttatacttttatgaaatcattggtagccccccaagtgtttaataactg

SEQ ID NO: 116 - DNA, 539 bp, homo sapiens
gtgcctattcattgtcactgtagatgcaaaacgaatgagctgtaaccccttcactcaaggcattgacagcttagctgtgagggtggacacacatatgtgtatttacagtgcagtgtaaatagttctgtagtagaggttaactccatatttctgtgaggtcactgaggccttatggactaactctgtgaggataggagttatatattcttataagacaaaacaaaacaggacaatgttacaagagtaagaggttcttacttgtacataggctttcctgctgaaaacaggcccctgctgtacagattttgggtacataatttagctcttttagtcagtccaagagatttaagtgaccccccccccccccgtgttttttttgtttttgtttttgttttgaatgccatgtaaaggctttttggttaagacctcacttttaaaactgccttaagtataaatagtacctttggaatatatttagttcatcatttgagctgccttcatactggtttcctcagccttccttcagcctgtaatatttt

SEQ ID NO: 117 - DNA, 433 bp, homo sapiens
agttctcacgaatattagtgcatcttgtcactttgatttgtcacctggttaaatagctggaagcttgtgcaaatgaaaaatgaaatggaagactacatttgtatatatatctgtataatttttgtttactagtaggttcagagagagatctgagatgttccttaacatgtagccatgtaattagaactcacaaggggcattgaaatgtttttctttttcagatagtctggggctatttacttattttaagtaagccaagtctaccatttgaaaaatggtgctttatttccatatctgaagcctgaagttattttttagtttgttttcatctaaaagtggaaagatttttgcttctgcgttattaagagcctctttgtttggaggagatggttatctccttcactcattaacctttgagtgcttgttatctaca

SEQ ID NO: 118 - DNA, 483 bp, homo sapiens
  misc_feature (169)..(169): n is a, c, g, or t
  misc_feature (264)..(264): n is a, c, g, or t
  misc_feature (367)..(367): n is a, c, g, or t
tttccagccccttcagataagctgaattgaacacccaaaagtgatagtaacatcattttcctttgcaattacaaagaccattaacccaacagaatctccatgctttacctgtttgtgatgtttttgttccattttattaagtctgactcctgataaatgaatcactacncaattaattttttctcattctttagattcatacacacagacacatatatcaagcaaactataaattgctaaaatgacaggccagcagtgactacnttgttatcacgtgtgtaacatctcttgagggctgctttgtaattcatttgtatggtgttgttgtaccagtgtaactgctaagtggtttctctggttccatgtncatttgtacatgaagttgtgcaatctccacataccagcagtttcaaagaatgacagtttgcatgaggccatcttaatagcaggtagcatgtaaccaacccatctgaattaagccac

SEQ ID NO: 119 - DNA, 440 bp, homo sapiens
ggagaggtactgaatctttgatgttttttgtcattgttctcaagtgcaatataacaatgtaaccaaatctagataatttcaaagttgtcattaatttagtaagcctaatataaacaaatatttgtattatttttgttagcaggaaagagtgattaagtgaggttatttacccctaaatggtccattctgcattgtatttcaggctggaaatgaattattctttaccagttttgaaacactttgaaatatcctaaggtaacttggaagctgtgtagtatatcaaattaatttgctacctaataacatagaaagtaaatatctttgtggtcacccacattgggtgagacagaaaatgaatctgttctaaaatttgtaatttgctaacttgatttgagttagtgaaaactggtacagtgttctgcttgatttacaacatgtaa

SEQ ID NO: 120 - DNA, 439 bp, homo sapiens
  misc_feature (330)..(330): n is a, c, g, or t
gtcttggataactaaactgcctttccagagaaccaaatgtcagagttactagaccaaatagtggttaaaacctccaaaggaagtaatgtaatcttattcataatgggattaacatattttagacattcattttaaacactacctcagttaatatagagtataaaaatctgtggtttaatccctcaaaagttaacagtaattttttttttgtcttacacacacacacaccccctcccccaccatcactatccctgtaccctcaccttggtcatctatcctgaaataaggcttagttagtattggcctgaatgttttgtgttttttttttgnttttttttttttactgttactttgaaaaatatgtatgtataccttatcatatctgcctatatcacttactttggggagatactcagagctttgtggttatcagtatact

SEQ ID NO: 121 - DNA, 479 bp, homo sapiens
  misc_feature (61)..(61): n is a, c, g, or t
acaggtttcagttatgagtcactttttcgcgaataccttaatgagacagttacagaagttnggatagaagatccttatattagacatactcatcagctgtataactttcttcgattttgtgagatgcttattaagagaccatgtaaagtaaaaactattcaccttctcacctctctggatgaaggcattgagcaagtgcagcaaagtagaggcctgcaagaaatagaagagtcactcaggagtcacggagtgctgttggaagttcaatactcttcttcaatacatgaccgagaaattaggttcaacaatggatggatgattaagattggaaggggacttgattattttaagaaaccacagagtcgtttttcccttggatattgtgattttgatttaagaccatgtcatgaaacaacagtagacatttttcataagaagcatacaaaaaatatatgatgggtggtagcctaatttgtatt

SEQ ID NO: 122 - DNA, 402 bp, homo sapiens
  misc_feature (353)..(353): n is a, c, g, or t
tactcatgcctttttgtttaggataaataggtaagcacaaagagctcttcaaaatcagaaaaaacaataggagtccttccttgtcttttctgtgatctctgtccttgtttctgagactttctctaccattaagctctattttagctttcagttattctagtttgtttcccatggaatctgtcctaaactggtgtttttgtcagtgacagtcttgccagtcagcaatttctaacagcattttaaatgagtttgatgtacagtaaatattgatgacaatgacagcttttaactcttcaagtcacctaaagctattatgcaggaggatttagaagtcacattcataaaacccaagngctatgggtgtattattcatgatagctggcccacaggtcatgaattgag

SEQ ID NO: 123 - DNA, 376 bp, homo sapiens
caagctcaaattatagttggtcacaggattctaaagtctttatttgacttctcctttttgaactggctcaaatggaaaagtgtagttgcttttaaatgttaaaaataagtttaaactttatatttcccattggtttcccctattttgtcctttctttgtgtgcttgaaatattttatttttcagtttgtcctcatagggaatcaagtattttagctaggtgatgtcttgcaagtacgttccactttgttacaatctactatctgtatatactatttgtatcttaattcttttatgagatgttctgtaacatttttctcactttgacaaatgtttttagactgtacagtcaagatctggcgcttgggggtaagtgga

SEQ ID NO: 124 - DNA, 360 bp, homo sapiens
  misc_feature (63)..(65): n is a, c, g, or t
ggcagtggcctgtcaaggttgcaatctgcctaatattcataaattcacatatttattgagacnnncttatgtaccaggaactctatcacagatacacaaataaggtactgctgattcaaaagaaaatcccttgtcctcaagcagctcaggttgtgagggaggctttcctagaccttgagactcgtatttattgtcagctctttaaacaaaaagcactctatgaagtgctgtactttacagtcgtttttatgattatctccctgtgagaaaagaaaattgaaaggaaagtagagtgacttgtccaagatcacacagaagatgtactagcagagccagaattatgttctagctcagtttggg

SEQ ID NO: 125 - DNA, 465 bp, homo sapiens
  misc_feature (50)..(50): n is a, c, g, or t
gttggtttaatgcctttatttctctttaaggaccagaaccaggaatactntatcgaaaaattagtctgtggatttaacactgacttagcatatagcttaaagttgctcttttggtttttaacttcctccatacataagcttcaaggacaataagatgttaaaaaggaggaaataattatttttattttgacactgtgacagttttggtaactaggatcctagggagggaaatgtttgcctgttgaacttctttctgttatgagaggatttagttaggtcattaagatgttgatcacacagcttcaatcacaatatgccaagtataacctggtttcgttagaggtgtctacagtccagatgttcttcgtaataaaagcaaagtttttgaacctctgagtccaaagcaggctggttggcataatatgtaatttgaaaaataaaatcttatcttgcagcactatcagt

SEQ ID NO: 126 - DNA, 342 bp, homo sapiens
aggtttgtatgtgcgcagagccctgtcgcaatgccccagcaagcttcttgttggcatgtggccactctaaattgtgctccaggatctgctatgggtccatgcttgcaggagaaacagctgtgtagaatttcctattgcatttcatttgtgggtttagaactcggttgcttatttcatattgtctcccttttcagtccttcaaggtacatttttccaacttctctaatgaattattacatttctgagtagctgatatgtttttatcttatctaagcagtatatttataattccttctttgcattggctaatctgattagtagttcagaacccaattttcagat

SEQ ID NO: 127 - DNA, 489 bp, homo sapiens
gagatactatttttgctgagcaaccagtgtgtttcaggatgatacaaagaaaaatatagaatagaaataagtgcaggcttggaatcagctacaaatcctaaagatggggtgtgtgtggatgtgtgtgtgtgtgtgtgtacaccattgtgtgtttgtaaaatgtgtatgttcatgagtaagggtgtgtgtgtgtgtgtattaaaattccagagtgaccgtggcacttgggtgtacaggtaattcctccagagctgtttgctggcttcaggagtggagtgagaatttcttttttatgaaaagggatataaaggcaccgagctgatgcagtatttgtaatattaagttgacctaacaaggtatttgcatgagtcacaattacaaagttttgagcggttttgtaatttgacatttaggaaagtctcctatttattctcatactttacattcatgcttagtatactatagaggatgccagctttaatctttctg

SEQ ID NO: 128 - DNA, 403 bp, homo sapiens
aaaaccaattcattatttgtccagaaggaagcttggctgagctggccttttaacataggaatgtatttcgttggaaacattctgaaaaatctcagagaactgaacccttacaaactttgttttccctcataaccaaagcttcaggttagaagtttagaaaaatagaatggttgggtacatgatctaaatgtttaatgctaaaggtatatcgtaagggtagtgtttgtttttgaacgataatttagaagttctcatagaaagcgtataacataggtcttcagaaactataaaagaattttcatatagtattaaaatccatagactaaaatctgagaattttttaacatatgcaagtcagccaaacataagctaccaaaataaagagcaatgtgttctggctgtt

SEQ ID NO: 129 - DNA, 527 bp, homo sapiens
  misc_feature (277)..(277): n is a, c, g, or t
  misc_feature (366)..(366): n is a, c, g, or t
ccaagcaaaagctcaccagccagagataaagtgaggccagctcagggaatgtgagcagtggcgatttattccctctggtgttccatgttagcctgacacagagccccctcttcacattctcaggggctcttgatccaaaaccttttttaaaaaaaataattttagacttaacagaaaatctgcaaaaatagatttcctgtgtgcccttctctcagcttcttctaatgttaacttacataccaatggtacaattattgaaactaggaaattaacattnggcacaatcctattaactacatactttatttgaattgtagctgttttcccagtaatgttgtttttctggttcggtattcaatccagganccatatgtacttgggtctttctgggttttctgttccactggtctacttgtgcatggtaccacactgttttaattatagagactttatagtatgttttaacaactggcaaggctagtcccccttataatttttcctattgtgcttctggctattcatacatg

SEQ ID NO: 130 - DNA, 392 bp, homo sapiens
  misc_feature (94)..(94): n is a, c, g, or t
  misc_feature (131)..(131): n is a, c, g, or t
  misc_feature (151)..(151): n is a, c, g, or t
  misc_feature (180)..(180): n is a, c, g, or t
  misc_feature (204)..(204): n is a, c, g, or t
  misc_feature (227)..(227): n is a, c, g, or t
  misc_feature (229)..(229): n is a, c, g, or t
  misc_feature (257)..(257): n is a, c, g, or t
  misc_feature (269)..(269): n is a, c, g, or t
  misc_feature (306)..(306): n is a, c, g, or t
  misc_feature (309)..(309): n is a, c, g, or t
  misc_feature (321)..(321): n is a, c, g, or t
  misc_feature (339)..(339): n is a, c, g, or t
gtccaaggtcagctcaacattgctttattccacacctctcaatgggtgtatgatgcgggcccactttaacactgtatcagtggttgattcctancgtgcagatctttctgctctttttgcctgaattatcntcaatgttctttgtgcaaanatcacagccagtatagtctatttccaaangagctgtaaagaggcatttcaganacttccctaaacaatatttcttnanaatgcaccaagctggataaagccgcttngtgacctgcatnaaaactccaacggataaatgtgtattaccttcccaanganctacttctccanagttattccagctctttnccagttgaaatgtcaaacttgacataaaaatgagatgttcttgcatcaattaa

SEQ ID NO: 131 - DNA, 470 bp, homo sapiens
acttgaatgattatgtgaccctgttatatttcagtgttgtgacaaatgtgtaaactagcgggggaagacagtattgtatcataaatgagatgcgtagtttgttttctttcatgggaagtagagataaaaatatatacatttctctaattgagttgtttagagaaagaactaatgtctcatatgatgtatttacttattttaaaaaaaagaataggaatgagatgtccctgagctgtacttttctattattataaggcctttaggcatcagtgcatctgggttatcaacattttctcaaatgctgtcaatattttactgtaatttatgttcttatatttatgtatatttgttaaaactgtaaaaaaatttcacagatttttttccaatacctgtgcaagatacatgtgtagctcaaaactatttgtgatctactgtttgcatgtaagagaccaggatatgtaactcttata

SEQ ID NO: 132 - DNA, 361 bp, homo sapiens
gccttttaagttactgacatcagcttccaccagtgtaaaaattgagtaaaacctgaagttttgcataaaatgcaaattggtgcctgtgcttgaaggttgctgtagagcatctgaccccttattaccaccttaagcaatgtatatgccatgcattaccatgcactaattcaatcacaggtgtttctatctagatttaaatatatttgtcaatgaatgtggaatagaaaatctaaacatgacaataatagacatatctttgtatggtaccagttagttttgccgtggatcagatggtttataaaagtaataaccataaagcaaaaaataatttgaaagcccgtctattcctatgctcaataaa

SEQ ID NO: 133 - DNA, 369 bp, homo sapiens
  misc_feature (204)..(204): n is a, c, g, or t
atcttttcacttcccatctgataagtgctagctgctgatttttttgctcagtatctccatttatatcaatttattttcatctctagagcagcgcatcaggctgctctctcgtgaatatattgttacttttttctggcactggaatatacaactatccatgacagcaaaatttgagggccatattgagatcaccggctgatatgntgaccatgtaaatataagtttaaattgcttagttccacgttagaatagtttaatcaatttctgtcccagaaactggatatgaaacaggttagatgaggaagcttatatggaaaaaaattatctttcatcctctccacatatacatttttcctgagactaggtcat

SEQ ID NO: 134 - DNA, 208 bp, homo sapiens
ccatgggcttcactgtataaataggagaggatgagagcccagaggtaacagaacagcttcaggttatcgaaataacaatgttaaggaaactcttatctcagtcatgcataaatatgcagtgatatggcagaagacaccagagcagatgcagagagccattttgtgaatggattggattatttaataacattaccttactgtggaggaa

SEQ ID NO: 135 - DNA, 357 bp, homo sapiens
atatttcagtatgttcttcagagggatagttctgatttttcatgccttgggaagaatctcttgcttcaatgctaaaaatacttggtagatcagcatgctggctctcctcctgtgaagaatattctggctgaagctgttcaaaacattgttcagatcctgcattaagaaattcaaaaatcagttaatcatcgttacatgttgtaaaagttggatactgacagtctctaatagtttatcatccaattgcaagtaacctacaattttaggcataaaagttgatgtgtataaacatgaatacaaagataaggatggtcacagtgatttctcaaactacagctcacaccaagtattttttct

SEQ ID NO: 136 - DNA, 454 bp, homo sapiens
atgcatctcataatcagactccatgctttttaaagacagagataatatcttctctattctattctacttcctccatttcaccatttatacaaagtcattcaaaaaggctgattcatgccttcctgcctcttggctatggccctccccatctactctttaaactttaatctataacttttcatcagttttgttccctatctagaaaacattttcttctgtttgctaatctttgtccctcacaatttttgaaatccatctcatcactgaaatactttcttcttcaagtacttttttatttttcttcaacttctcttgatttgacctcagtgctttgaattcactggtgctacaatatgtaactgtggttaattgccttgtaaattttgcgtgtctgtatacttttataccaacttattgtaggctctttgaggtcaggtatgtatttctttcccat

SEQ ID NO: 137 - DNA, 381 bp, homo sapiens
  misc_feature (109)..(109): n is a, c, g, or t
  misc_feature (122)..(122): n is a, c, g, or t
  misc_feature (333)..(333): n is a, c, g, or t
tcgccaaggttatatggagcccctgatttccatcaaaaaggtttctataagtatattatttacatttttatacatgataactcttgcctttgtgttgaaaaaaaaaaangtctctttttttncccccactcagcagttattggaaatagactgttcccatctgaaaccgtatcgtaatttgcatcaggaaacccaactgctgacattgaggacctgggtgtgttcaattatgattttgctggaggctgtccctcattttaatgctgcagctattgaaccaccttcctgaaacctagctgatacggaatagcagagacatgcctctcaacaccnattagctttgcaaatggcttcatttcagtcaacgtcgacttctgcttt

SEQ ID NO: 138 - DNA, 220 bp, homo sapiens
cagccacgatgagatgttctccgacatctacaagatccgggagatcgcggacgggttgtgcctggaggtggaggggaagatggtcagtaggacagaaggtaacaatgatgactcgctcattggtggaaatgcctccgctgaaggccccgagggcgaaggtaccgaaagcacagtaatcactggtgtcgatattgtcatgaaccatcacctgcaggaaaca

SEQ ID NO: 139 - DNA, 499 bp, homo sapiens
  misc_feature (322)..(322): n is a, c, g, or t
gttcagcattatttaactacaacacaatgctgcaaatatttcacagtaattatcaaaatttaatgggctctaatttaaaatgttatttaataagtatagattttaattgagaattatctttgagtagatgtaatcacaaagtgcattaactcttgttggaatattttatggctattccaaagtatagagtgcctaaattttgtgttgaaaatgtctttcatgacggtattaagttttctgaaattacacatggcttttaaaatttctaatgtatccaagatgtgcaatgttgttaggatctcattcttcagtgcatgaaaanctactaccctcagaacattttgtgttaattgtacctgcaagaacacctcaggcaagccaagaagaaatgaaacccaaataaaacttgaaaatgcaccttaaaaatatatatacatataatagttttgaaatgggattctgctttattttgatggaatggccattaaatacacatttt

SEQ ID NO: 140 - DNA, 368 bp, homo sapiens
gaaatctggaaccttcttctgggtagatacaggataagatagatacagggtaaaatgttgagcactttgtacatgctttgagagcataatctttgtcatctgtttttttcccctagacaatatcaggttaccgtcaacattaatccatttaaaaggacatggactgttgccattaatacttttggattccatataacccttaacacaataacttctagaaaatgtgtgtgccgtagacacaaagaagggaacaatagacaccagggtatacttgagggtggagggtggcaggagggtgaagattgaaaagctgcctattgcgtgttatgctggtttcctgggtgacaaaattacctgtacaccacacc

SEQ ID NO: 141 - DNA, 463 bp, homo sapiens
  misc_feature (41)..(41): n is a, c, g, or t
atgcatacccttatataagcagaattatgagttaaagtaanacttagcaatatgattttataatggctcctcattatgcttgctgttgaaccttttatgaggagtgaatataaagtattggttttccctcacaaatttaaagattatgttattaatactattataactgcatcaatcaagtcagataaaggcaactataaaatagtagtagtgtttgtttcctatctcaagggcgaaattttatgggaactcaatttattatgcagtttttaagtttaaaataccaagaaagatgtcactagattctcttctatgtgatttttgttttttatataaagcagtgtagtggtgtttagaagctgaggccacctgtaaggcaaatctgccttaagtgtattatgtgttacttaaaggcaaatttgtgatctaaaagtacaagagtgatttttgagctaggattata

SEQ ID NO: 142 - DNA, 516 bp, homo sapiens
  misc_feature (352)..(352): n is a, c, g, or t
  misc_feature (358)..(358): n is a, c, g, or t
  misc_feature (366)..(366): n is a, c, g, or t
  misc_feature (372)..(372): n is a, c, g, or t
  misc_feature (376)..(376): n is a, c, g, or t
  misc_feature (380)..(380): n is a, c, g, or t
  misc_feature (472)..(472): n is a, c, g, or t
aagttctggtgagtctaattgttgaccagagagattgtttacttcagagcacctggatttgaattgcagtgtgccacctgctgctgtgttacctggtacaagttaatgcattctcttcacacctcagttttatcatcttctgaatgaggctaatagtagtacctgtcatagatgcttgtaacagtgcctgcatagagtaagaatgaaataatgttagctattttttattgttacatttaaaatagattttgctggtagtgaaatatgaatgataaaatcatctcctcagctgttttccttgcataagtaccttaaaataatgtatttgcaatttccttctgaatccttgaantaaaangacaccangataantcangaangatgttactgacattagtaggcatttgaagttcactctgatgggatcagtctatttacaacaaattgctatagagagtaaaaagcgccaacnttttcctgtagtttttgaatgacagcatctttgttcatgcagtt

SEQ ID NO: 143 - DNA, 420 bp, homo sapiens
agccaggaggacaccaactgcatcctgcttcgctgtgtttcctgtaatgtttctgtggataaggaacagaagctatccaaacgtgaaaaggaaaatggttgcgtccttgagactttgtgctgcgcggggtgctcactcaatcttggctacgtgtacagatgcacgcccaagaatcttgattacaagagagacttgttttgcctcagtgttgaagccattgaaagttatgttttagggtcctctgaaaagcaaattgtgtcagaagataaagagctttttaatcttgaaagcagagttgaaatagaaaagtctctaacacagatggaagatgtcttgaaagcattacaaatgaagctgtgggaggccgaatccaaattgtcctttgccacttgtaaaagctgaactctagtctgtgtcctc

SEQ ID NO: 144 - DNA, 562 bp, homo sapiens
ggtatgttttttcacatttctcataatttccacgtcaactcccatgatgatcatgcaggaaagcagcatgattgcacttcttgtagtgcataccatcactaaaacatagttactgtctttctgtggtcttaagaaaaattcagaaacagcataccaatgtacatataagataaataagcttatgtggtacagtaagtgttctgttctgagaaataccttgattcgtatcctaatgtctgatgttattggtagttctcaaacttccccaattctgctttcatctaaattcatcttatctatctattgttaaataatctatcagtccatttttatctatcatctatatatctgtctttatcaatcattcgtctgtaatctatctgtgccgtttggcataagagacagaagggcatagcagtggaaactcaaaggagttacctccatgtgaatggacagtggtgatggtgatctgtgaggtggtgatgtatagaaagaaaaactagaagagagcatgccctaactcagggaccttgtccagcaggcactctggccttgttatact

SEQ ID NO: 145 - DNA, 539 bp, homo sapiens
gggatagtgcttcttgaccattatagaacaacaaactgtcaaagggttaatacagatgacccagacctgacattaaatcctcttgattagaaataattaaatgaattatttattcatttctctcctctgccaaatctacttagccccacaaaaatgccccagctcagttaacatttttttgtttttcactttaggtatctcttaggcaaatagagatataaattgtaataggaaacagtctctaaatgtgaggctgaatacagcttcagtctggctctctaataggacaaaagccagtccatgtgttgtctctcactgatttagctttttcttttctttgaacaattcggcatgaattgaaaccaggttttcctgtggaaagttatagcttgattgggagatagaagttgaattgagttctttcttgcaactcttagtgtttatttttatatctcagtaagacgaggataccttcagtttgaatctgcataatgttcactgccaaactccttctcatttaatgcttatggccttcacat

SEQ ID NO: 146 - DNA, 327 bp, homo sapiens
gcaaattcctactgcatgtattttcccatgatgcacattatgtgtaggagttatctgtggtgtgggaggctgtcattcattcatttttactgctgaaggcttacatatcgttttaccacaatttcaccagtttcctattgatgtacatgtggctgattccagtttttgccataaatattagtgtgcatgtctcctgtgcacataggcaagaaagccccaaagctcccagagtggatgattaggaatgggttggttgcatgatacattgtatggactttaaccatactagataatgataatatgatttccaaagtgattgtggctact

SEQ ID NO: 147 - DNA, 442 bp, homo sapiens
  misc_feature (48)..(48): n is a, c, g, or t
  misc_feature (111)..(111): n is a, c, g, or t
  misc_feature (128)..(128): n is a, c, g, or t
  misc_feature (134)..(134): n is a, c, g, or t
  misc_feature (142)..(142): n is a, c, g, or t
  misc_feature (149)..(149): n is a, c, g, or t
  misc_feature (153)..(153): n is a, c, g, or t
ttagtgacctgttgtacctgaccatgttcttaagggggaggtctcacntctcattcccagaaaagtctaccatatatagatacatattccccgccccgccccagatttctnggtgaatgaaatcactngtatcntattaggnacatatncgcnaatccttaacctcaattctctgtcctcttcatgtcttacccagatatctcaggaagatttctcttttccttctgtttgcctccctcttcgacttacttgggagtcagcatctgaccacagtcgtgactggtaatgatgatttgtgcaaatactatcaaggaaaggacatgaattgtcttaattttagacccattaaaaaaccgcacaggcctcaatcttaaaagtcctatctaaatacccagaaatacccttcagaatttttgaagctatgcccatgtacaaaattttc

SEQ ID NO: 148 - DNA, 347 bp, homo sapiens
  misc_feature (34)..(34): n is a, c, g, or t
  misc_feature (69)..(69): n is a, c, g, or t
aattttgcttcctaaactgatcacaactattaancttagagaataataatagtctttctgatgaggctnccatattttgagcatcaatcttatgataaactattcttgtcacttggcatcaacctcttcatgataaatatctactactgagacacttcaattcacagttttaactggtgaatacctgggtttatttactattactctgtgttgctattttctaagaaagaatacagcactagacttcatcctagagtttcaggtaggctaatgcttagtgcctgagtatttaaattttcttttcaaacaggcacagttcacattgctagtatggtcctaactttctg

SEQ ID NO: 149 - DNA, 244 bp, homo sapiens
ctggtgcaaacagctgcacagcaagtggcagaggataaatttgtttttgacttacctgattatgaaagtatcaaccatgttgtggttttaatgctgggaacaatcccctttcctgagggaatgggaggatctgtctacttttcttatcctgattcaatggatgccagtatggcactcctaggatttgtcacgaatgggaagccaagtgccatcttcaaaatttcaggtcttaaatctggagaag

SEQ ID NO: 150 - DNA, 465 bp, homo sapiens
aaggaggtgcacatgagtttttagcaaacaggtatgaataagcagctatgtatatgtgtttggggcagaggggagcagattactttaacacacttcagaattaaaatcagttcgtttcatgactctgtgccttaacgtttgtgtgaactaaacttgctgattgaatgaaattcttgggaagccgaacagtaatagcagaaaatgtgaccaaatgagtatcatgtacttaaatcactgaattttatataagcacaagtattaattttaaaaacattatagtttaataaagctgcatttaaaaatatttgggagcaaagacaagcatgctaaatcttcattttgctatggctataagcatatatttttggcaacttatttgcaatattcttgccttaaagtttcctgcaaatttcccccttagtaattcccgaatagcaaaacattaatattccatgattagctcta

SEQ ID NO: 151 - DNA, 357 bp, homo sapiens
gtaatgtcaagtggagtaccccagatacattttagacatttatcgtcatcatctgctctgagtggaaggccgttcagagaggctagaggttcttattctggctataaattatgtgagtaaaattgtgctaaccagttaaaagtactgtacacccatgctcaatatatagtcctggaaatagcaattgaaacatgtcttctcacaagagaaaatgacagttttaatgatgtatttgatgaatttaaactttaagtcaggtgctgcaaattggaaagaagacttgtggtgttttaagttgctgtggacacttttaagaaacttagaacccatggaacccttgtttatcgccatgcaaat

SEQ ID NO: 152 - DNA, 574 bp, homo sapiens
tgaggagcatcctgcatcttttgactggagctcttttaagccaatgggatttgaagtatcatttctgaagtttcttgaggagtctgcagtgaagcagaagaaaaatactgacaaagaccatccgaatactggaaacaaaaaaggatcccattcaaattcaagaaaaaatattgataagactgctgtgactagtggaaatcatgtatgtccttgtaaagaaagcgaaacgtttgtacagtttgccaatccatcacagcttcagtgcagtgataatgtaaaaattgttttagacaagaatcttaaagattgcactgagcttgtcttaaagcaacttcaggaaatgaaacctaccgtcagtctgaaaaaacttgaagtacattcaaatgatccagatatgtctgttatgaaagatatcagtataggtaaagccacaggcagaggtcagtactgataattaatgtagtataaatacatcatttaccattttattttaaataggaagccatcaagcatgctagaattgtgaaactttcattatatttttttgttgttgacatgaattaacctggccaaa

SEQ ID NO: 153 - DNA, 139 bp, homo sapiens
aaaaggaaacagaatagtcaatggaaaaggaaaagggcctcctgcaaaacatccttccttgaagcctagcactgaagtggaagatcctgctgtgaaaggagcagtacaaagaaagaatgtacagacattgagagcagaa

SEQ ID NO: 154 - DNA, 325 bp, homo sapiens
  misc_feature (189)..(189): n is a, c, g, or t
aggactcatacgagagagaatccgtatgaatgtaaggattgtgggaaagcattcagcttgcttaattgctttcatagacatgtaaagacacaccagaaggaaaccctatgaatgtaagcaatgtggcaaaagctttcacttcttccagttcttttcaatatcatgaaaggactcacactggggagaaanccgtatcaatgtaagcaatgtgggaaagccgtcagatcagcctcaagacttcaaatgcatggaagcactcacacttggcagaaactctatgaatgtaagcagtatgggaaagccttcagatcggctaggattcttt

SEQ ID NO: 155 - DNA, 321 bp, homo sapiens
aaagtttgcctttgatccagattctttcggatgtcagggatattcacattgacatgtctttttagtgttccaggagattttagtttgaatagtacaattttttcttcttacaacaaaacttagaacggcttctaacttatttcttcatggccaagaaactaccctaacttatctcgataaatatttagttctgtcttatttctaatgtgtaaaacaggttttaaaaataatatatagattttgcatttataaaaaaagatttaatttatagaaccaaacttgaacatatgtttaatttagcctaatcagaaggttacagaa

SEQ ID NO: 156 - DNA, 397 bp, homo sapiens
  misc_feature (26)..(26): n is a, c, g, or t
  misc_feature (28)..(28): n is a, c, g, or t
  misc_feature (32)..(32): n is a, c, g, or t
atggaggagagatctgcttatggganangtangaaccatgaagtgactgtcacacatgcatgtccaagaaacatcctgaaaacacatgaagtcgtaaactggagaagcagctctacagcagagattatcttcgtgtttcctctttctactgggccagaaaaatcctcagggttgcagttggttgagtgggcagttgacatatgcatgttgcacccgatgttgtctctaagttagcaatgtgttatttccagctttaaaggtgagattgtagagatgctgtcaaagggataaggaaatagcaagatttttaagtagtgtgtttgtgaagactgatcccattttacaactgcctgttctttctccagtccttttttttccagccagcttgactattaga

SEQ ID NO: 157 - DNA, 264 bp, homo sapiens
ggatggactggggctatattctcaggcttcctgggctctgttggcattgggcaagcacgtaatgcctggtttgaggctagaagccaaagccacaaccttcttgcagtaccaactgagccatagggagattaatgcagaacaaggtcgttagtctcattgtttatccagttactagccgcatagattttgtgtaaatttcagctacagtggttgcagcctgcctttgatgtgtgtaatctgtacattttagtgctccaggaaagt

SEQ ID NO: 158 - DNA, 536 bp, homo sapiens
atgatccctatgcatttattttcatggatacccttaatttcatgggcatgcctaataatgatctatgttctaactggagcttagggcttattttagatattggagtgtagctttattacagatggattttatctttcaacattgcattttgatcaactttgtatattcacgtgtattaaaatattgtgcactaaatgttttgcccttgtttgctattatatggtcaaggcatttatcagcactattgtaatgaactcatgtaagtggcatgggtcagggaaaattatttcctacttttctgcctaattaaatttctgttttccagtattacattaatttatttttggcttccatttctgtataaccaaaatagttactgtatttgtgtggcattcctattattttgttgctaaaaatattgtagtttttatttaaaataatctgtaccttaattttttaaaatgtaaccaattcaagcactttaagcaataatgtcaatcttgtgaaattttaatcagtttaacaccctgcctcta

SEQ ID NO: 159 - DNA, 420 bp, homo sapiens
gttcacttttgaaccctgtggtgtcttttaactttgttaagggcccttggttagcaaaattatgaaagtttaggaaatttggctattgagtatattaagtacaactacaaaatcctctgagttctccaggaagcctaaaccttgagcagtatcttattcaagtggagtatatatcttcaagaatacagatttttaaggtaagtagtttttcgtctttgcatctcctaagaccattgttaacaaccttgatattaaacgaagaagtgaatgtaaacctccttttgaacatattttttataaagaaatattttgttaattggagtaagtagtattgttatgaaatcactgtgtaattgttaattgtaaactgcaatgtctattttgtgttgtaacaatgttgccataaaatagctttgctaa

SEQ ID NO: 160 - DNA, 505 bp, homo sapiens
  misc_feature (105)..(105): n is a, c, g, or t
gaatgatgaaccgatgccgcatgcaaccaggttgaatctcagaagcataattgtaagggcaatgagctggatatagaaggatatatgcattatagttctatttanataaagctccagaaacagtagtgtttgggcatctatatttgagtggtaaagctataaaggaaagtaagaaagcaacagctaaaactgtcatgagagtgttttgttttgttttggagagaggaaagaggttgtgattgggcaaggacttatgggaatttctggagttctgatctgttctgtttcttgatctttatggtgatttgctttataataatttgttaagctgtaaatttatattttatgcactttcctctgctccccccgccccccgcttaaagagtgttttagaatgtggaaattttaagataagatctatctcagggcttgttgtaagaatgaaatgaagtataaagccatgtagagcttgtagaatatgcctggcactttgtaagaccttaat

SEQ ID NO: 161 - DNA, 419 bp, homo sapiens
gtaggtgtgttctgaaagtgtctttgaatatgaagcttgttttttcatcagtcgattgtacaactttaaggaatacagaaaaggttgattcacatatgacttgtgaataatttacatggggtatctatacctttgtcttagatacctttttttggaaggataaattttatatttttctattattttaactagaattctccaagtttgaatatttgggcagggtttttgttattgtttgtatctttacctaaattgctcaggcattattccagcagtagatagtgactgtgtattactgaaattttacaattcaagagaggaaatcagctccaaacttagcttttccagtggatttgtatatgtacttgctttatctctttacccttaaaatgatgataccttgtattcaccattgtttt

SEQ ID NO: 162 - DNA, 547 bp, homo sapiens
  misc_feature (38)..(38): n is a, c, g, or t
  misc_feature (54)..(54): n is a, c, g, or t
  misc_feature (58)..(58): n is a, c, g, or t
  misc_feature (61)..(61): n is a, c, g, or t
  misc_feature (67)..(67): n is a, c, g, or t
  misc_feature (69)..(69): n is a, c, g, or t
  misc_feature (73)..(73): n is a, c, g, or t
  misc_feature (79)..(79): n is a, c, g, or t
  misc_feature (82)..(82): n is a, c, g, or t
  misc_feature (95)..(95): n is a, c, g, or t
  misc_feature (102)..(102): n is a, c, g, or t
  misc_feature (110)..(110): n is a, c, g, or t
  misc_feature (116)..(116): n is a, c, g, or t
  misc_feature (125)..(125): n is a, c, g, or t
  misc_feature (129)..(129): n is a, c, g, or t
  misc_feature (158)..(158): n is a, c, g, or t
  misc_feature (176)..(176): n is a, c, g, or t
  misc_feature (282)..(282): n is a, c, g, or t
  misc_feature (328)..(328): n is a, c, g, or t
ttataatccatcatagcacctcacacaatgaactccantgtctggtttgttggnatgnccnccttantncatngtaagnttnttaagggtagaanccagttntgataggnttaggncagtgaccnccancagaaaaagtacttggtaaatgtctaacncaatctgttttacttttnccagagcacgaggcatgcatgaaagagattaatttactccacatgggaagttactacccaggcttaccaaaaggtcaggtttatataaagtggcgttccttttttncccccttagtaagacattaaaaaaagaaaccacaattgaaaagccnagagctatctgtgatacggaatatgaacacagaatcagattctcatagcagctaagctgttccccaggcagtggttctcaaggtgtgcttccaagaacagcagcagcagcggcatcacacatgcaaattactggactctgccccagatccacagaattggagactggggatggggcttagcattctgttttaacaagtcctccagatgattctgttgtg

SEQ ID NO: 163 - DNA, 444 bp, homo sapiens
tttgaatgtggttacttcctactgtagggtagcggaaaagttgtcttaaaaggtatggtggggatatttttaaaaactccttttggtttacctggggatccaattgatgtatatgtttatatactgggttcttgttttatatacctggcttttactttattaatatgagttactgaaggtgatggaggtatttgaaaattttacttccataggacatactgcatgtaagccaagtcatggagaatctgctgcatagctctattttaaagtaaaagtctaccaccgaatccctagtccccctgttttctgtttcttcttgtgattgctgccataattctaagttatttacttttaccactatttaagttatcaactttagctagtatcttcaaactttcactttgaaaaatgagaattttatattctaagccagttttcattttg

SEQ ID NO: 164 - DNA, 509 bp, homo sapiens
ggaacaggatacttgcaatcttgaagaggaagagcgaaaagcaagtaccaaaatcaaagaaataaatgttcaaaaagcgaaacttgttaccgaattaacaaacctaataaagatttgtacttctttgcatatacaaaaagtagatttaattctccaaaatactacagtgatctctgagaagaacaaattagaatcagattatatggccgcatcttcacaactccgtcttacagagcaacatttcattgaattggatgaaaatagacagagattattgcagaaatgcaaggaacttatgaaaagagctaggcaagtatgtaacctgggtgcagagcagactcttcctcaagaataccagacacaagtacccaccattccaaatggacacaactcctcactccccatggttttccaagaccttccaaacacattggatgaaattgatgctttattaactgaagaaagatcaagagcttcctgcttcacgggactgaatcctacaattgttc

SEQ ID NO: 165 - DNA, 153 bp, homo sapiens
ggaactatgtctggaaggctgtggtccaaggccatttttgctggctataagcggggtctccggaaccaaagggagcacacagctcttcttaaaattgaaggtgtttacgcccgagatgaaacagaattctatttgggcaagagatgcgcttat

SEQ ID NO: 166 - DNA, 412 bp, homo sapiens
acaggtgcttctttgttgtacgcagaggaattttttcttttgattttgtttactgaaatttgttatacttcaaaagccataacttgaaaaatactggtggcgtcgatggtgagtgatttttatcccacgtgggccttttgctcagttccatggcaattttgtaaattgaccctagccagagaatagatcagtatttcactgataccacgaggaaaagaacaaacaaaacttaaaagtattcatacaccttgctaacctaaaagacagcagggacaagatacatatgaggacaaggtatacacccagttctgaataacttgaagaacaggcttggcaaagaagtaagtttatccaaatcttgaatttctgccaggcatggtagctcatgcctgtaaccctggcacttaagggg

SEQ ID NO: 167 - DNA, 358 bp, homo sapiens
acagcttgacttgtgcctgttttcagataaaggagtaaagtgatctacaaactgtaactatcttgaaagagaaattgatcatcagatggtcgagtactcttggaatgtctctttgctgtttactgtggcctctttacaatggtgagacttatttctaccctctactttccactattatttttttcccctattggataatactagtctgagcagccctaatactagatgtacctaaacagagatacaagccaagtcattgttcagtgtagtcatttcttagtatctgtttatattttgtcacacatcagaatgtatattttatagagcatgtgtttgtctacttgtttgtctactataa

SEQ ID NO: 168 - DNA, 502 bp, homo sapiens
ccctccccaacgttaaatgctcgagaggaatcttccacaaggcagggccatgcacgcaacctgcacacgcacttggagggcccaggtgtctctccaccagcccccatgcagtagggactggaagatatgtcatctgctggttgtgttatcactcccaccccctaccccagcccgtcttccggaatttctcaactaaatttcattattgggcaggaaggaggtcatgggttcatttcatttttgttttttgtgtttttaattaaaagaaaggttacctcagttttcactccttagacatggatgtagctacctttttttgtatgtctttttttttttaagcaatcgtgttgaattaggagtatacttggtgtggaaagagtatgaatttgccatgtgatttgcaaatggggggaagctactgtgagcgtgtgtttttttaatttacactatagagtgatttttttttcccccaacgtcaagtttttaccttgcatgtactgga

SEQ ID NO: 169 - DNA, 382 bp, homo sapiens
  misc_feature (169)..(169): n is a, c, g, or t
  misc_feature (347)..(347): n is a, c, g, or t
gaacaggaacttggtcttattccctcctatatttcggtgcccagaatagcacttggcacacagtcttttgagtgagtggatgaccttgtgcacaatcagttattatcattgaacttcggtaaagcattaattgtggcatctttgtcagatgtttagataagatggttgncgtacgcatagtctgcatgttgtatttttagtctttgaagatatgaagtcaggtaagcaacatcctaacatagtctatttcttgacatctcttacaaacgtagagtatagcctatcctcaggtgtgtgctgaagtttatattagggcttttgggtaccttagaatgtgggtattgcantctttattcaggatgttatcagtcactggtacagt

SEQ ID NO: 170 - DNA, 313 bp, homo sapiens
gtgtccccagatgcttgtggcaaatgaaaagatggatactttaaagattaatgttgagtatacatctaccacacatatttttcagcccagagacattttccttttgtcaaacacgtgaaagtttggggagaaaggctgaatctgttgggggagggttctaatttttataggctcttgactccattcccacccttttagttcacgctaagttgctttaaagacacaaatgtcttgctaaaattggtagaaatcttttctcggaaaatctgagttatgctttattagaaatgttctgacactcatttaattttcc

SEQ ID NO: 171 - DNA, 397 bp, homo sapiens
attttcctcataaagcattgctccagctaatcttatctatttttctccagaatctccatccccttcccgtcagatacatctaaaactttttttgtatctttgtttttcctcgtgttgtatcatcttcctaaaacatgttctacttgtgaaaaccctaagaaattctctctgtcttattgaaattctatctccactgtgaagcattatcatggtgtggccatatatgatctatccctatctgaagtcactgcatttattccctgatcctcatttgcaggtccagtaccttgtacaagtttctttttgtgccatattagactgtaagctccaagagggcagggcccaagtcttatgaatttgtgtctgcatagtgtctagtacttgtctgaggcccaca

SEQ ID NO: 172 - DNA, 169 bp, homo sapiens
tgaaatgtcaaacccttaggccttgacttggggtctgttacaaaaatattttgtgggggagaaatcatagcttttgtctttgaggttcatcagttatagttacccctgggggcctgggatgggaaggagacctattttcactgtgcaccctgttggactgttgaaatta

SEQ ID NO: 173 - DNA, 357 bp, homo sapiens
tttttcttccttgatacgtatgagattcaccagtaccagtttttctcttgtggtggcatatagttgattgtcatttgcattatctattaaaaacctgtggcagctcatggtattattgaccatatgttctagtgtcttcttgcagatttaaatattttattgcagtgtaaagtttaatatttagatgtgtgatacatctttggataatctgtaattaaattgatcttttgtaatggtgatagtgattagcacacactgaaaatccagcaaagcaattatttttctctttttaactggaaatcatattcgtaagttgtggtagatattatcatcagtgtattcatgattcgatttata

SEQ ID NO: 174 - DNA, 497 bp, homo sapiens
gccttccgagagggcaatgctgcccgcctgttccgtctgctccagaccctgccctacctgccaagttgcgctgtgcagtgccatgtgggccatgcccgccgggaagccctggcccgcttcgctcgtgcctttagcacccccaagggccagaccttgcctctgggcttcatggtcaacctcttggccctggatggactcagggaagcacgggacctgtgccaggcccacgggctgcccttggacggagaggagagagttgtgttcctgaggggtcgctacgtggaggaagggctaccgcctgccagtacgtgcaaggtgttagtggagagcaaacttcgaggacgtaccctggaggaggtggtcatggcagaggaggaagatgagggcacggacagacctgggtccccagcctgaggagggagcgtgagcctcccagagccccaggactgggccagagcacttaggtttctttttccatggtttccaggtaataaaag

SEQ ID NO: 175 - DNA, 423 bp, homo sapiens
ccaacaaggggctggctcagtacctcaagcaatataaggaagccatacatgatatgaatttcagcaatgaggacatgataagagaatttgacaacatggctagggtggaggataaaaggagaaaaagcaaacagaaattgggggcgtttttgtggatgcaaagaaatttacaggaccccttctatcctaggggtccaagggaattcaggggtggctgcagggccccacgaagggacactgaagacattccttatgtgtagtgtccctggcaggcatttgtcaggccatatgttttaaccttatggtaatactttgctttagtcgttcctcctgctaccagtagcgttttgacccacctgccagtgtttgcttgctctatgtttcagtagcagattttcacacatgtgcattgcagagacgtca

SEQ ID NO: 176 - DNA, 528 bp, homo sapiens
  misc_feature (221)..(221): n is a, c, g, or t
  misc_feature (226)..(226): n is a, c, g, or t
  misc_feature (233)..(233): n is a, c, g, or t
  misc_feature (243)..(244): n is a, c, g, or t
  misc_feature (247)..(247): n is a, c, g, or t
  misc_feature (262)..(262): n is a, c, g, or t
  misc_feature (265)..(265): n is a, c, g, or t
  misc_feature (269)..(269): n is a, c, g, or t
  misc_feature (470)..(470): n is a, c, g, or t
  misc_feature (476)..(476): n is a, c, g, or t
ctgtgtgcctgtgagagactgtgtgtgtgtgtgtgtgtgtgtgtgtgtgatgaatgaacagggttgtgtattgtgtgtgtgcgttagacaaatgaacagtgttgtgtacctgtgtgaatagtcactgtgactccaggctctaggctctgcagattcctcagccctatcgcctcacagacacttgggatgtagcagacaggtcaaagagagaagccagattncatgnaggcgtngaaggatccnngcnagaaaacacagactngantctngagacgagatttttgaaattggttgcggcctcaaggcaggctctgagaagactcgataaagagttctcaggaataggcatccctcctggatatttcccccttggaagcgccgaggagccagctctatgtttgtaaccatagcatttctaaagctccagccccaggaacctgctgtgaattagagacagattccaccctagncatcantgatcttggcctctcttgtattgggaaggtcaacactgttccagtttctctc

SEQ ID NO: 177 - DNA, 409 bp, homo sapiens
  misc_feature (283)..(283): n is a, c, g, or t
  misc_feature (309)..(309): n is a, c, g, or t
  misc_feature (358)..(358): n is a, c, g, or t
caaccctggacgtgtttcatttacaacattcataggagttaacttagcagtgttgcaagttaaggttccaaaccaaattatttaatcagtgtccccccaataaatcacttatccatttattgctagttagttttatttatagcaacttgatttcctatgagtatggctcctgttgtaagaattttcccacctcttctgacatgaatgtagcataagttagcaatcggttcttccaaactcctgtgggttgaatatggtatagaaggtatgcaagaggaaaaanaaaggaaaagataaaactcctgcctnagaatttggaagcacctttattaacacatatatctcgcagaaactagangctcataggctgttaactttttgcaactattcactcatttttaccactttt

SEQ ID NO: 178 - DNA, 437 bp, homo sapiens
gtttggaggctttcctattctagcatttaaatttaaattttattaaaattaaataatttaaatctagcatttaaatttaaataatttaagtctagcatttacttttaaataattataatgaagttttgaaatactaagttaatccagacctttagttgtcccatggtgttaataaagttgccaaagaagatgtattatgaacaattcagcaataagacaattgtcaacacagttgagaataacaatggtaatcgttagtaatatttagaattggaatttgcctactgaaatagttatagatgattacttgtgatgtgaaactgaattgagcatgacaaccagacatttccagttggttttgtaagttttgagaatctagatactgggttttattttttgaaagattagctctgtttgtaagggctgattccttgaaa

SEQ ID NO: 179 - DNA, 438 bp, homo sapiens
gtgcaaagccttggcatgttacacagctgacgtaagagtgatagaggaatgccattacactgtgcttggagatgcttttaaggaatgctttgtgagtagaccacatcccaagccaaagcagttttcaagttttgaaaaaagagcaaagatattctgtgcccgacagaactgcagccatgactggggaatccatgtgaagtacaagacatttgagattccagttataaaaattgaaagttttgtggtggaggatattgcaactggagttcagacactgtactcgaagtggaaggactttcattttgagaagataccatttgatccagcagaaatgtccaaatgatatcaggtcctcaatcttcagctacagggaatgagtaactttgagtggagaagaaacaaacatagtgggtataatcatggatcgcttgtacccct

SEQ ID NO: 180 - DNA, 541 bp, homo sapiens
caaatatgtcctaaaaaccaccaaggaaacctactccaaaaatgaacaaaaaaaaaaaaaagcgaaagactgcagttgtgctaaaaacaaaacaaaacaaacaaacaaacaaaaaagtaaaaaaagattactttcgagagagaagtttaagcttcaccaatgctgctcctgaccaatggaaatatgtacaacttcagcattttaagtaactggcttcaaggggtactgtggcaaccaaataaaataactccattttctaaaactttcatgtaacttttatgtctggactacagttcaagtggacaaaaacatttctgtattttttttaagtaaataagagtagttgaactgagcaatacctcctcctgtgttgtattacacatattagccacgagtttttgcagtgaccagataaacttgaattgacacgtggtgtaataaaatggacaaattctgtagagtagacacagtgagtatgtggacctcttttataaggaaaaatacattttggattaaaatcaattgcttctgtcttgttttg

SEQ ID NO: 181 - DNA, 398 bp, homo sapiens
  misc_feature (253)..(253): n is a, c, g, or t
agaaagatagatgccctctctcttcatcttcacttgaaataccggatgattttggaggtaggtctgaagatccaagagatttttataacagctataaaacccaagcaggtagtagcaaaacagaaaagccatataaatcagaaagacatttttccagtagaagaaattcctcagattccttctgtaggaattcagaggacaagatttatggttataggagatttgaaaaggatatagagggaagaaaagagcnctatagaaggtgggaaccaggttctgtgaggcattctacctcaccagcaagctcagaatactcttggaagtcagttgagaaatacaaaaaatacgctcactctggatcacgtgatttcagtagacatgagcaaagataccgttta

SEQ ID NO: 182 - DNA, 521 bp, homo sapiens
gaaattctttgctagctggtggtgatgatgacaccatgtcagtcattagtggaatcagcagccgggggtcaacagtacggagtaaaaaatcaaaaccatctacaggaaaacggaaagtggttgagggcatgcagctttcactcactgaagaaagtagtagtagtgacagtatgtggttaacgagagaacaaacactgcacacccctgttatgatgcagacaccacaactcacctccactattatgagagagcccaaaagattacggcctgaggatagcttcatgagtgtttatcctaagcagactgaacatcatcaaacacctcttgattataatcggcgtggcacaagcctaatggaagatgatgaagagccaattgtggaagatgttatgatgtcctcagaagggaggattgaggatcttaatgagggaatggattttgacaccatggatatagatttgccaccatcaaagaacagacgagagagaacagaactgaagcctgatttctttgatccagct

SEQ ID NO: 183 - DNA, 467 bp, homo sapiens
agcacatagcagtatttccctgcaagataaaaatcctccctcagtacatttttaattctcgagatccgatagtgatgggggtgacggtggaagcaggtcaggtgaaacaggggacacccatgtgtgtcccaagcaaaaattttgttgacatcggaatagtaacaagtattgaaataaaccataaacaagtggatgttgcaaaaaaaggacaagaagtttgtgtaaaaatagaacctatccctggtgagtcacccaaaatgtttggaagacattttgaagctacagatattcttgttagtaagatcagccggcagtccattgatgcactcaaagactggttcagagatgaaatgcagaagagtgactggcagcttattgtggagctgaagaaagtatttgaaatcatctaattttttcacatggagcaggaactggagtaaatgcaatactgtgttgtaatatcccaa

SEQ ID NO: 184 - DNA, 396 bp, homo sapiens
gaatagttcccacagtacatttcctatgtaaattatgtttgaatgcaatttttagaaccattttaagatacattttgcaatctgttaactgtaggcatccgcatttttcttccattacataatctgtttatctgattaagttggcaatatctgctaggatccacagaatgcaggaaaaaaagcagttatttctcaaggtttgagaaatctggtccacctttagtgtagtttcctgagatttctgctccactgaagtcaaaaccaggattttctttttggaatctctctaatgtaagctttctctgcatttggtcttgcacccaaggatccgctgcatattcagattctagtagagaagtccaacaatttgctgcatctctctttgtctttgtaaga

SEQ ID NO: 185 - DNA, 517 bp, homo sapiens
  misc_feature (205)..(205): n is a, c, g, or t
  misc_feature (330)..(330): n is a, c, g, or t
  misc_feature (361)..(361): n is a, c, g, or t
  misc_feature (463)..(463): n is a, c, g, or t
aatactgtttatattcacatgattttaagaaaactgtaaaagcaaagattttgtagtaatgacacaaatgtaacaaatagatgttttcttaaaattggcagtcagtataattatgtttctgcctatgatgttgaggaagttgtatcagtctgattcttagttttttcatctgttaagtagaacgtactattacttaccttaaagngtggctttgagaattttgtaaggaacaaacatgtttttggttctggaatataggaggtgctcaataaaagttgactctgactggcaaataatattgttttgtaaatgcatgatgattatttttgnccatatttgacttagtttcattaggctaatnttaattggtactatatgaaagtgagtcaactaattataaaagattagaaatgtcttaggtgacgatgggggaaaaacttaaaatttttgcataaattatggngagatgatagagttattacagtgttattaagtattcctatgttgcattttgcaa

SEQ ID NO: 186 - DNA, 218 bp, homo sapiens
  misc_feature (92)..(92): n is a, c, g, or t
caatgctctggtggctagggatgtactcatgctcatatgtgtgcacgcttggacacccacctccatggacacctagccaccctgttgtgtgnccttatgccagttgagctgaatcttttccccagtatagtggaaagactgaggcttctgcctactgagcaaggttgggtgcttcatttgtgttcagtctgaattatgggaaagttagctcttcccag

SEQ ID NO: 187 - DNA, 459 bp, homo sapiens
  misc_feature (195)..(195): n is a, c, g, or t
caagtactcacatttgcaatttgtaaatattcaaaattttattaaattcttccgaattttttctttcagtgttttgtttgcaattatgaattgtcatttttaaatattttttattagataagcttgagctgtgccttaccttttgtgtgtaataattatgtactaaataatgcattactatttgtttatcttcanatatgagactaccatatagctatgccaatttacgtgttccttggagtggtggtggaaaaatacctcttctttcagagtttatgtggatttacatagtatgagtgttttagctatagggtgttttaaactgtgcttaaaataatttgttacatgttttgttactgtgttactttattgaggacagctagtccctttgtgttgttaaacgtttaaagacagttgagaagcttcataactctgttcattgtaaatcttagctttctt

SEQ ID NO: 188 - DNA, 550 bp, homo sapiens
  misc_feature (488)..(488): n is a, c, g, or t
ctctctaagcccattttctttatctgtaaataaaggaaaaagatctgtttggatttgggacaggagagttgtctgttttatagggtaatgtttatgaaaataatttatcacctaggtacttagtaaataccagtttctgtctctgtttttcttcaaagctttgttgacaatgtaggatattgccaactaatcctttgacttgagtgcttagccatgccccaatccaggcagcatgaagaatgatcaagaaggggacacctagtggcagttgacctttgaggatctatctaggatcaggttactgatttgggacctctgaatcagtacatcataacatcgagagtgatctctgccaaaattaaaattctgtcagaacagtataagcagaaggaagacattaggtctttctgaaatatggagctgataacttctatcagttctgaattctgtactgtcccacccccaaatcatctatattgttgcatgtncttagctttgtgccttgaattgctatttcctttttatcttgcactcagatggtatttttaga

SEQ ID NO: 189 - DNA, 515 bp, homo sapiens
  misc_feature (278)..(279): n is a, c, g, or t
cgatccttggagatcccgtaatcccactacccttctttggctcagagaggataatttgcctaatgatacattaaagttagtggcaaaacttaatttggagcctgatttcctactgacttccaatttagtgctcccccagtatgctaaatagaaagccctctgcaatatattaaatgtatactaaatgtatatatttaataatgtcatgtataaaatatgaataaaatgtccacataggaaattaacacatatataccttctctgataagcactcctcnnatgtgtcctgattatttactttctcttatcttttccttagtgttcctcaaattatatctatcctctaaaccagggatcagcaaactataacccccaggccaaatctagcccactccctgtttttatagataaagatttgttggaacacagccacactcatttgtttacctactatctatgattgttcaaccatgggagagttgagtaattgtgacatggaccataggccctaaaga

SEQ ID NO: 190 - DNA, 548 bp, homo sapiens
  misc_feature (187)..(187): n is a, c, g, or t
gggcctcatctcagatcagatctactaaatcagatactctaggggcaggggcaggggcaggggctagcagttgtgtttaagcaaactctgcaggtgtctttcttatcctagtttgagaaccaatacccaacaacctacgtgattttggtgcaagtagtgtttgaaacacactgaagattactgcccnattactaagacatttttcaaaaagcatgttttaaatcagtgtagtccaggatcacactatattaaatataaagataacttaaaggatcattggatcattcattttggccaaatttttagcttctccaaagtgactaacatcagggcctacaataaaatctgtaattctccaagtttagtaattttatattgaggcaggaagggctcattaagtactaataagtacataatttattaaaaacatacataagtgtcatcaaaaaggtccacaattgttagtaaaaaaaattaaattgaagtagtaaatgctgttttataacatacatttttctgctaattcattctgttttgtgtgacctaat

SEQ ID NO: 191 - DNA, 530 bp, homo sapiens
gagagctttaactacttccttatttttatgcaatcattttaaagattgtggctatatctaatttaaatttgctgatgattgaatctaaattcaagtgaagaccacagcattaatcccaaaggagattttttttatgtttagaggtggagatattagggtaaatcagtatattgctcctgtcatcaaagtttttgttcatttgtgtgccacatcgaatagcagcacttctcaaagtttgtcaactggaaaaaagtgtttaaaactgtttttttcttaagcagatttggtgatgtcatcaatatctatgatatcgattggtaaaaggtctttctttgttgaggatttgagctctctttttaagagtttattttattttaaaggaacatatgctttgaataacaattctctgggcatgtttaactaacctaggtgggaaaaccatggtgctgtttaattgtaaatagattgatataagattggaccagtacttgatgtgtataattttagtatgtagggtttatgtgcttttt

SEQ ID NO: 192 - DNA, 395 bp, homo sapiens
gattactgattgtcattctgccaccctggagtatataatttttaattatctgattactgttattcttccatagtaggggaggtgatatccatttgcctgatacatagtatgtgttcaatacacatttgctaaagaataaatgaatcaataatacctaacatctctaatttgcagtcattcccaagagtaattattaaatatgtggcaaatttctttgcctttttacttttaaaaatctaattttgacataactgctgtaaccatccagaaacggcattgatgttgcttcacgttgctgatgcttaagcaatgtatattgtgtaatatacaatgtagtcttcaaactaatttcaacttctgcctttctgtgtactcccttatcccactgggtgata

SEQ ID NO: 193 - DNA, 523 bp, homo sapiens
ggtatcttcataaaatcggtgcactgagaatgcagctggacccatgtgaagatacctcactccagcccacttcctaggaacaatggaagaagaaaggactgaaccagggtatttttgttaggttttctatgtgactccaagagggaatggtcaagttgtttcatgagtttgcatgggcccttggaaaaacaggaaaggagcaatgaagatccaagcaaaactttactttcagcgttggcttggaggacaaataagaaatgaaacatcctatgaaatactttatagcacatggcagatttgcaactagtaaaatgctggtgaaatgctgttggtaaagcacatggtccaaatctagaagatgcagttcaaaaacaagacagactcgagttgttagggctgaggaaccaatcaaggtagaacaaagaaaatgttggggtaaaagtgttgctgattgtcaacacaaactggcttaataatattaataagaacctgtcttattaagactggctttagaaccgtaggt

SEQ ID NO: 194 - DNA, 459 bp, homo sapiens
  misc_feature (376)..(376): n is a, c, g, or t
aaaacccagataacaaccagagcaaaactgttgtgccttctatttatctttgatttcagtcttggcaattgtttaaaaaaaaaatctagatttgttttattaggttcagagtatgtggggaattatagaatccctctttcatcactttgtgtatgtcttttgttaacatatttgttatgccttattctaaaattgagtctcaaactggaatgcctttgaagacagatgcttctatagaggttctttgacctaaatagttcagcatttgtatttttattctggtatctaatcagattcctaatcatagcccgtaagaaggaatgttactttaatattggactttgctcatgtgctcgtgtccgcatttttttttttncttaaaatcatagccatatggtaaattttctattttgttatggttctcttttattgatgggcatgcagtgggtgttacttgga

SEQ ID NO: 195 - DNA, 396 bp, homo sapiens
gggtcctgtgctgataatgtttctgttcatatttctatgccctggtacctggatcagcttttgttctacacaaaaagacttgtatctggcttatttctgaaagctagtgttggccatgatgaacttttagagcaaaagatttcaggcagagtacattcttacatattcttacacaatcaatattcagttccagcccgcacagtagccctagcaaatgccagtgctccttccagagattcacctatggattcagtaccccagaagagaatttctgtaaattcttggggaagctatagctagactatggctcaacactcatttttcccccatgattcttaatctaacagtggcaatgttggcctcttcttaggcaactagattcggttcttgcttatt

SEQ ID NO: 196 - DNA, 289 bp, homo sapiens
ggcattgctatcccatttgtggacagatttcatatgaagttgttttgcggtgtcagccttttcttcagagcatttgtttgactgacttccaaagcaatcaagagagccacgtctagcagactttacaataaaatgtcaatatgaaggactgtaattcctagcagtttattgagaatttcactggaaatggaccatgtgttgcaagactaattggctataattatatcctatcaaagaaatcgatacgtaatagcagattgttttatattcattccattttgatggtgtt

SEQ ID NO: 197 - DNA, 364 bp, homo sapiens
  misc_feature (136)..(136): n is a, c, g, or t
catcatagcatgtacttccacaaacctagatggtatagcctactacacacctaggctatttggtatagcctgttggtcctggggtacaaatctgtacaacatgttactgtattgaatacagtaggcaattgtaacncaatggtaagtatctaaacatagaaaagggacagtaaaaatatggttttataatcttctgggaccaccattgtatatgcggtacatcattgaccaaaacatcgttatccagcatatgactgtatttggttatgaaagccaactgttacttgattctgcttttagttcttaagaggatcaggcttttaaatactcatttacaagttttctatcctccttcagtgttaaa

SEQ ID NO: 198 - DNA, 347 bp, homo sapiens
gcggggaggggttgagattgtactttctaatttcgcttgcttcagacttgactttggaatgaagttcgaaggcatcacaattgacctggacattccaaaaacaaaactgaagaggcagcatttctcttccgtagtccagtcagctcatttggtagatgcgctttttcctcctttgcgcttattcatccataaggatatataatttgcatatatatttcatatgcgtgcatatgtgtgtgtatgtgtgaactggcaggtgttgatttcataaggacaaaattgttctgcaaaccttgcaccaattatggggtgtttcaacggaaaaacttcaccaaatgatctgtgtg

SEQ ID NO: 199 - DNA, 519 bp, homo sapiens
  misc_feature (339)..(339): n is a, c, g, or t
atgttctctcctattttagatccttttccccgaaggtatggaaacattatttctgtaagcttattcttctatatagatgggaagtttttaaatcagataaggttctaagggcatgtggacaatttacgttatcatagtattgttcataacgtccatcattattctgtagactgtaagggcttacttagctcgtgtaagaattatccttcaaaaagcatttttaaggtattagtattgctaatctataaactttgtgcaagaagtcctaaagtcaatagcaacatttatttaaagtacagtttgtcatacttaataaacctctggtatattttcctttantatgcttgttaaaaacacagtataaatgggagaaatcattaaagatcattaactccaaggctgctggatgttaggacccttaagcatacttaaaagattgattgtaatcaagaataacttgtatcagattgccttccagtgattcacatttattagttcaaccagttacatacctgtagc

SEQ ID NO: 200 - DNA, 510 bp, homo sapiens
  misc_feature (386)..(386): n is a, c, g, or t
atataattacctttggatacctgaaattcccaagcttggttacaatgtaatgctcagtataaggctgtgcaaacatgtaagggaataatggtggtcgatgggatatatgaaatgggatctagagggcttcgagtgaagccaatcatgttgaacgaacactggttcagtgtagatgaagtagagtgaggcgtatgcagtcataaaatgaagggtggacaggagattacatttgaagaaaggataagcactcagacttggtctcttttaaattaaaatatttcttttctcatgtgcaaatgtatatcaaagacttgaacaggtattctcttgaaatttgaggatttttagtttttaatgctgtctttgcttaatattaaatatgtgtngcctattggctcccaaattgtgtgggagtctctaaatgtttcctcttgaaggttcattattgaaagtggttaagtgcacaatgctatttttgtttgatagtttgagttttatgaccctatgagt

SEQ ID NO: 201 - DNA, 227 bp, homo sapiens
  misc_feature (66)..(66): n is a, c, g, or t
  misc_feature (70)..(70): n is a, c, g, or t
  misc_feature (73)..(73): n is a, c, g, or t
  misc_feature (76)..(90): n is a, c, g, or t
  misc_feature (93)..(93): n is a, c, g, or t
  misc_feature (98)..(98): n is a, c, g, or t
  misc_feature (107)..(107): n is a, c, g, or t
  misc_feature (111)..(111): n is a, c, g, or t
  misc_feature (114)..(115): n is a, c, g, or t
  misc_feature (118)..(118): n is a, c, g, or t
  misc_feature (120)..(120): n is a, c, g, or t
  misc_feature (122)..(122): n is a, c, g, or t
  misc_feature (127)..(127): n is a, c, g, or t
  misc_feature (130)..(130): n is a, c, g, or t
  misc_feature (135)..(135): n is a, c, g, or t
  misc_feature (137)..(137): n is a, c, g, or t
  misc_feature (140)..(140): n is a, c, g, or t
  misc_feature (152)..(152): n is a, c, g, or t
  misc_feature (158)..(159): n is a, c, g, or t
  misc_feature (164)..(164): n is a, c, g, or t
  misc_feature (193)..(193): n is a, c, g, or t
ggaaactaaggctttactcatcagtcttaagtatggttgttttatgtggcaattgggagatactgntacntgnttnnnnnnnnnnnnnnnggnaaatnaaatgagcnttanagnnacntncnaaacnggnctggncncgnggtaaaactgtnaatgannctaantggacagttaatgcccactgaaagaaatncatgaaagagaagtaactgttactcaagccacca

SEQ ID NO: 202 - DNA, 300 bp, homo sapiens
cagatcgagagcaagactgcttttcaggaagccttggacgctgcaggtgataaacttgtagtagttgacttctcagccacgtggtgtgggccttgcaaaatgatcaagcctttctttcattccctctctgaaaagtattccaacgtgatattccttgaagtagatgtggatgactgtcaggatgttgcttcagagtgtgaagtcaaatgcatgccaacattccagttttttaagaagggacaaaaggtgggtgaattttctggagccaataaggaaaagcttgaagccaccattaatgaa

SEQ ID NO: 203 - DNA, 548 bp, homo sapiens
aaactttttccgtttgctatctcagggaggtggaaaaatcaaggttgagattttgaaaatcctttcgaattttgctgaaaatccagatatgttgaagaaacttctcagtacccaagtgccagcatcatttagttccctctataattcttacgtggaatcagaaatccttattaatgcccttactctatttgagattatctatgacaatctcagagcagaagtgtttaactatagagaattcaataaaggttcccttttttacttatgcactacatctggagtgtgtgttaagaaaattagagccttagcaaatcaccatgacctcttagtgaaagtgaaagttataaaactagtgaacaaattctgattggttatgtaccgtcaaaagacttgaagaaatttcatgattttgcagtgtggaagcgttgaaaattgaaagttactgcttttccacttgctcatatagtaaagggatcctttcagctgccagtgttgaataatgtatcatccagagtgatgttatctgtgacagtcaccagctttaagct

SEQ ID NO: 204 - DNA, 469 bp, homo sapiens
  misc_feature (40)..(40): n is a, c, g, or t
gacatccttcttagcagaaacttcatgaaaaagtttttgnctgacacagaacaaacctgaaagtagtatctactttctaaatactactttgcttttcagtagtggatttgatatttataatgttctctaaagcttgcaactttttcagcaacgtttaaaaatagattaacctggaataacttacttgtttgctgctaaaatactcaagattttgccatttttaaacaaccagtccctgtgatacaactttgaaaaaacttttaaaaatctctgatgtatgggctctttttttcccataagaattatgtacatctgtgatgttttacagggggatccgcttttaaacagtgtacatattggaccacactgaaatgtcatatatcctttctctacttaaaattggttatttactgtgagttcatttccgatgtgttcttggttgttgctgttttctgcctgaagacgtgta

SEQ ID NO: 205 - DNA, 531 bp, homo sapiens
gcttctgcaccttatcttaaagcacttacagataggccttcttgtgatcttgctctatctcacagcacactcagcacccccttctctgcccattccccagcctctcttcctatcccatcccatcccatcccatcccatcccatcccatcccgctcttttcctacttttccttccctcaaagcttccattccacatccggaggagaagaaggaaatgaatttctctacagatgtcccattttcagactgctttaaaaaaaatccttctaatctgctatgcttgaatgccacgcggtacaaaggaaaaagtatcatggaaatattatgcaaattcccagatttgaagacaaaaatactctaattctaaccagagcaagcttttttattttttatacaggggaatattttattcaaggtaaaattctaaataaaatataattgttttttatcttttctacagcaaatttataattttaagattccttttcttgtttatcagcagttgttattacatccttgtggcacatttttt

SEQ ID NO: 206 - DNA, 400 bp, homo sapiens
caggtgaatctcttcctttaagccatttttgtctcctgtgaatacagccttatctccacctgtttcttagatcccatctcccctggcttattttttccattcattaccctctttgttccctttacttctcaacctgtgctatatacatgctgttctctctgttgagattgccttatttccatctaacattctctctcctgctattctgatttgtcattcacaactgatttcaagagtcaccttcaccaggaagtcttccttgaccaccatcattcctgcctgattagagggcttcctcatggtaatatgtgttctcaagttttcagtgtcaaggaatgccatcccagaagctcattctcagatgcacaacagccagaacagtctcaagcagcattctaga

SEQ ID NO: 207 - DNA, 466 bp, homo sapiens
  misc_feature (73)..(73): n is a, c, g, or t
ctctcttaacatccaagccttttaatgaaatcgtactgaaatctgtatcagctaagagtcctccaatcctggntcccattaactccaagtgcctttttgacagtgacaacagacagtccctcgctttttgttgttgttggttttcttaacccctttaatggaactgcctggattttatacagttattaaaggatgtctcttttgctttaaactgcatgctgccaagtgccatttggggtcagcatcctcgtttcaacacagtgtgctctctagttatcatgtgtaacgtgggttctgtttagcgaagatagactagaggacacgttagagatgcccttccctgctccatccctgtggcaccattatggttttttggctgtttgtatatacggttacgtattaactctggaatcctatgggctcatcttgctcacccaatgtgggagtctggtttgagcaagcgagc

SEQ ID NO: 208 - DNA, 542 bp, homo sapiens
  misc_feature (60)..(60): n is a, c, g, or t
  misc_feature (62)..(62): n is a, c, g, or t
  misc_feature (100)..(100): n is a, c, g, or t
  misc_feature (102)..(102): n is a, c, g, or t
  misc_feature (168)..(168): n is a, c, g, or t
  misc_feature (280)..(280): n is a, c, g, or t
  misc_feature (284)..(284): n is a, c, g, or t
  misc_feature (312)..(312): n is a, c, g, or t
  misc_feature (322)..(326): n is a, c, g, or t
gtatttcttcctgataatttctgagtaaaattcattttaaggaagtaggaggggcagtgncntgatgaaaagcaaaaatgaagaaaagaataaggaaagncncagttttgccatcaccagccagtgtttagtgatcttaaaatagctgcttttgtttttgagcatcanttgttgggtatggagttgcagaagttgggttgagggacactggcttctagaatcaaatattggcctccatagagtgtttctgtacagtgagttgggaggatgggcaggggcnactngaggactgtggcgtgtccccacgttagnagtgtatctnnnnnagagcctgtcctgaaaatatagttatttttaaaaagtgtttccccctccttttcattggccattttctcttttactactctttacctagcaaagggtgggcatgagaaacctggtcagtggaagagaaagccattttgcaacagtggttataggggtgggagagtaaaatttcctggttcctggggaagctaagcccattggtaggaccagacttt

SEQ ID NO: 209 - DNA, 237 bp, homo sapiens
  misc_feature (208)..(208): n is a, c, g, or t
tgggtctgagtcccttgcttaagggattttgaagtcctagttttcagcttgcagagattatgtctgaaatgcctaatgagtcgcagggatttgttgagactccgtaatctcaagttctctttgtgagctatcagcatctgccagtctcttgtcctccctgagtatctcacagtccatatcctgatgagggatcaggcccctacctctnccaaggcaagtaatggtagtgggctttta

SEQ ID NO: 210 - DNA, 402 bp, homo sapiens
  misc_feature (48)..(48): n is a, c, g, or t
  misc_feature (142)..(142): n is a, c, g, or t
gtgtatcttttgaaattccgcagaatctctgcttctcttgttttgctnccaacaattatggataatcatgtcttagctaaaagggccccaagttataacatactgtttttctctaatatgcttcttacaaatagccaatccntattagctgtgtggcattgaaattcaatgctattactaattttcctttgacatcaatagtaacgttacctcataatttgatagtcattatagctatgaagggaactaatgcccaagattctcaaaaatgcaagattgatgtgtttctttcttttcccctctgtcataatttacctatataacagagtatttacagtcatcattcattcctttctttaggaatccaaagtggtaattgcccaggaatatacagtgttcttg

SEQ ID NO: 211 - DNA, 523 bp, homo sapiens
  misc_feature (35)..(35): n is a, c, g, or t
  misc_feature (38)..(38): n is a, c, g, or t
  misc_feature (377)..(377): n is a, c, g, or t
atttgacctgatacttggtgctgatatcatatatntangaagaaacattcacagatcttcttcaaacactggaacatctctgtagcaatcactctgtgattcttttagcatgccgaattcgctatgaacgggataacaacttcttagcaatgctggagaggcaatttattgtgagaaaggttcactacgatcctgaaaaagatgtacatatttacgaagcacagaagagaaaccagaaggaggacttataattggctataatttataagaatgttgtcattgagtgtgtcacttaaggtcttagactgcaaatctaaccatatttaatgaaatgtcttactgtacaaaaagtctaagccaaaggttctcaggggagnaagcacatgtgcagttttaaaacaaagcagtgctttgtcccattgctgtgatttttagtcagactttactcagtctgaaatgcaattaacattaaaggattaagtgtgagatttcgatttatgctatttgtgtatcccatactcct

SEQ ID NO: 212 - DNA, 511 bp, homo sapiens
ggcctttcacagcggaatgcagttgtacctcacattacttttgaaacttcactcgttccagttggtacaagtatttgccaaagccatttcctatgttcaccgtggcccctcctgatgtggctgtcagcgcagcgttgttgaacagggctattctttttacaaggtgtgaagtgtggctcttcgcttcgtctttgccatggcattaaaagaaagttccctgtcttctttcaatattagttatttcaaatgaatatgtgctacttaaaagcttgttttgtttctttgtatataatttgccttggatttattgtgcacagtttgttgagttgtatgtttttgtgaattatcaggagtaaatttgacaagtacatgtgaataacctcctgtaaatgaattttataacaaaaatgtactgaactattttttaaagttgtgcagattagcaattttttgctatagctttgacttttctatgctgtgaattaatagctgcgatttggcaaacagccct

SEQ ID NO: 213 - DNA, 494 bp, homo sapiens
  misc_feature (237)..(237): n is a, c, g, or t
gcccttgcccatgcgttgcaagaaaatgccacccagaaagaacagttgctcagggttcaacttgctacaagtattggcaaccctccagtttctttacttcaacagtgcaccaatattctttcacagggaagcaaaatacaaacaagagttggattattaatgttgctttgtacctggctaagcaattgtcccattgcagtaacgcattttcttcacaattcagccaatgttccattncttacaggacaaattgcagaaaatcttggagaagaagagcagttggtccaaggcttatgtgcccttttgttgggcatttcgatttatttcaatgataactcacttgagagctacatgaaagagaagctaaaacaactgattgagaagaggattggcaaagagaatttcatagagaaactaggatttattagcaaacatgagttgtattccagagcatctcagaaaccccagccaaactttcccagtccagaatacat

SEQ ID NO: 214 - DNA, 461 bp, homo sapiens
  misc_feature (152)..(152): n is a, c, g, or t
  misc_feature (300)..(300): n is a, c, g, or t
  misc_feature (415)..(415): n is a, c, g, or t
  misc_feature (423)..(423): n is a, c, g, or t
aaggcacggaaggctatgtccaaactgggtcttcggcaggttacaggagttactagagtcactatccggaaatctaagaatatcctctttgtcatcacaaaaccagatgtctacaagagccctgcttcagatacttacatagtttttggggnaagccaagatcgaagatttatcccagcaagcacaactagcagctgctgagaaattcaaagttcaaggtgaagctgtctcaaacattcaagaaaacacacagactccaactgtacaagaggagagtgaagaggaagaggtcgatgaaancaggtgtagaagttaaggacatagaattggtcatgtcacaagcaaatgtgtcgagagcaaaggcagtccgagccctgaagaacaacagtaatgatattgtaaatgcgattatggnaattaacnaatgtaaccatatggaagcaactttttttggtgtctca

SEQ ID NO: 215 - DNA, 497 bp, homo sapiens
  misc_feature (32)..(32): n is a, c, g, or t
  misc_feature (47)..(47): n is a, c, g, or t
  misc_feature (56)..(56): n is a, c, g, or t
  misc_feature (65)..(65): n is a, c, g, or t
  misc_feature (72)..(72): n is a, c, g, or t
  misc_feature (289)..(289): n is a, c, g, or t
  misc_feature (386)..(386): n is a, c, g, or t
  misc_feature (389)..(389): n is a, c, g, or t
  misc_feature (395)..(396): n is a, c, g, or t
acgttaatgttcattacctcctcctaccccangagaaatggattcanacatgtctngtctcaacnagaaatngatttttttttaaactatctcattctgttgccaaatatcacagaagtaatgaggagtttagttacatttggctgttgtgctctgaaagagccaggtttggaatttgtgggggtgatctaggaagaaggttccaaagaagcagaggcatttgtcaagttacctaccctatatccagcatcctcctcatgagcttcagtagctgctctttgcccacgcntgtatcctacgtttgctatttgggcaaaccattacttcagttatttaacttccctttttttttaacttcacctttgactatgaacaagtaacggtancantccttnngtgtattcaataatgcagttagtttacctttttcagaatattttgaacaaagatctttgtctctttctgctggaatgcgcacacagtgaacgtttgttaga

SEQ ID NO: 216 - DNA, 309 bp, homo sapiens
tgtatctactttcttatgtcttgtttctcctttcatgtaatttttgttctgtatggagcaccactgatagagttggcattggaaacatttttatttgcagttattttgtctacttttactactgtgccttgcttatgtttgttaggaccaaacctcaaagcatggctaagagtgttcagtagaaatggagttacatccatatgggagaatagtctccagatcactacaatttctagctttgtaggagcatggcttggagcacttcctattccactggattgggaaagaccatggcaggtatggcccatc

SEQ ID NO: 217 - DNA, 425 bp, homo sapiens
agaatggtgtttacagtgctgcaaattacaccaatgggagctttggaagtaattttgtgtctgctggtatacagaccagttttaggactggtaatccaacagggacttaccagaatggttatgatagcactcagcaatacggaagtaatgttccaaatatgcacaatggtatgaaccaacaggcatatgcatatcctgctactgcagctgcacctatgattggttatccaatgccaacaggatattcccaataagactttagaagtatatgtaaatgtctgtttttcataattgctctttatattgtgtgttatctgacaagatagttatttaagaaacatgggaattgcagaaatgactgcagtgcagcagtaattatggtgcactttttcgctatttaagttggatatttctctacattcctg

SEQ ID NO: 218 - DNA, 387 bp, homo sapiens
tttccctgttcacttactgacatgtgaagaagggtttcttgctttcttaaacatttccgtaaggcaggctagaaatgtaatacttcaaatgtttgatgattatggtcttttgataggaatagattctgcttgggatatatatccaggcactctctaaggtctagggttgatattaacaaaggaatgtacttagaatagcagtacattttatgcaaatatggaaattattttaagaaacaatgacatatcaaaactgctttttacatgattttgaaatagactagaaagctttccctatagacatattaatattccaatcataactttaattcaagaatgcagttttaccaaaagaaaaatttgaaaatttctattcaggctactgga

SEQ ID NO: 219 - DNA, 527 bp, homo sapiens
ggaagtcagttcgtgaaggcaagtttgtcagtattttcacaaaactattcagctgaatccagaaagtgaaacagcaagaatttgcattgtaaaattgtgttataaaattggactttgaaatttcaaaaataagaaaaattttcatgtgtatttatactaaataccgttttaggaaactaggatcagggtgtttctgttggcgttggcattaactagctggatgtaaatttgaaaagccactcaagcagcttcctagtctagaaagtcagaggtttagattagatttccgacatcccttccatttctgacctgtagttcttgtctggaattctgctttgttataaactattgttctaaggagtttgttgtgatagcacatagttcattttgtaaagattccctgcgtataaagtgatgccctacatatgtgattttgtattaaaagtatataggatcattattttattttgaaaaatttaaatacagaaaagtataaaatataagtaccatccgcccagaaataacat

SEQ ID NO: 220 - DNA, 482 bp, homo sapiens
aaggcacggaaggctatgtccaaactgggtcttcggcaggttacaggagttactagagtcactatccggaaatctaagaatatactctttgtcatcacaaaaccagatgtctacaagagccctgcttcagatacttacatagtttttggggaagccaagatcgaagatttatcccagcaagcacaactagcagctgctgagaaattcaaagttcaaggtgaagctgtctcaaacattcaagaaaacacacagactccaactgtacaagaggagagtgaagaggaagaggtcgatgaaacaggtgtagaagttaaggacattgaattggtcatgtcacaagcaaatgtgtcgagagcaaaggcagtccgagccctgaagaacaacagtaatgatattgtaaatgcgattatggaattaacaatgtaaccatatggaagcaactttttttggtgtctcaaaggagtaactgcagcttggtttga

SEQ ID NO: 221 - DNA, 347 bp, homo sapiens
  misc_feature (99)..(99): n is a, c, g, or t
tcgctcgtcaccaagtctttagaatagctttagcgtcgtgaaccccgctgctttgtttatggttttgtttcacttttcttaatttgccccccacccccnccttgaaaggttttgttttgtactctcttaattttgtgccatgtggctacattagttgatgtttatcgagttcattggtcaatatttgacccattcttatttcaatttctccttttaaatatgtagatgagagaagaacctcatgattctaccaaaatttttatcaacagctgtttaaagtctttgtagcgtttaaaaaatatatatatatacataactgttatgtagttcggatagcttagttttaa

SEQ ID NO: 222 - DNA, 341 bp, homo sapiens
  misc_feature (116)..(116): n is a, c, g, or t
  misc_feature (128)..(128): n is a, c, g, or t
attgcattctatcttgggcaacaaatggagaccttgtctcaaaaaaaaaaaattcctgacatcgctatgtattcccaactttatcatttgtctgcctgtttagttttgacttatgntttttttttttnccccctgtggacatgtagttgacggaaatcgtgaaggaactttaatattttatttaaatttcccaaaactaatcatgccttatgtgactaatcttcagtgataatatttcatctactgatatattttcttgaggtgtgtaattttcagtataccttaatcatttggtataaaaaagagagaggtttttgatatatgaatgctgttcttgtaaa

SEQ ID NO: 223 - DNA, 532 bp, homo sapiens
gtcattaatttgttttgggctaggttttcaaacttaccaaattgctttaaaaaagcaatttggaaggtaatttgataggctttccaacttaaccaaattttttattgtaattcttggatagtatttttgtctttttcaattcatttgtctttttcagtatagtttttgttaaggcaaatgtcttcccttaatatccaaatattgctaataaacggtagaagatgctttggaaattaaaattatctcgctgttggttagacttaacactgttaatcttcagccaaatatcacatatggatcaaattattttcttttttgttgtttaccctatcctcaacaacatttttagtttaaattattgtagagattttttttgtggtggttattttttattttgctccaaaataataaggtgcaaagctattttatgcttaactgttgctctgtcaaaacagctatgcagtggagttgcatttgatgttctagagtttgattacatgcagagttgtatatagccaaaacttctcttatc

SEQ ID NO: 224 - DNA, 520 bp, homo sapiens
  misc_feature (50)..(50): n is a, c, g, or t
gtatggtgcctatctacactcacatgatattcttattcacgttttttttnaaccataagtggcaaatattttaaaatatttgaaaaacactccagaatctagtacgctttatttttagactgaacctaaagtaggttgttcttttaacaaagggtttaattcgggtggggaatataacatatcaaaatacatgaacaaatggaaagttacttctagaaaagcaaagaaattgggtatcatttttgtttcttgggaagctaattttgttgaatgtttagaattgagcaaagatgtaaatttttgaagggcagtttagaaaaattaactttgtgaatgaacttaagatgtctgtactctatatgtgatgctgtgcagtttgtttttatatggaaagatgtcaactatagccataaccaataaaataaaaactgatgaggcatgcagctttcagcacatcttttatacatgaagaaattaattttgtgttgctatggtgttgaaatatccaagatgttctgta

SEQ ID NO: 225 - DNA, 500 bp, homo sapiens
  misc_feature (54)..(54): n is a, c, g, or t
  misc_feature (59)..(59): n is a, c, g, or t
gaattcctcccagtgatggtcagtattcttttggaatgtaaaccgatttaatgncaaancaccttaacctttgtttctcagtgttccttaacagcctgccttttattaatctcaggcttttttatgaacactctcatttcagtagaatttggaaaactaagcgtggttggaatttctttgaattctgttagtaatgcccaaaagaaaagtctcaagcagtccccctatccagtcatttttatggagtttcatgttgtccactatagctggacactgaaccttttgcctaatttattataaaggcctgaccctctattgtcccatcttcacccccattccagagcagaggagtctctgtggaccatgaattgcactgtctccctcctcatttctaaatgaaaggtattagatataaatttttttgaaaggttagttgtttgagatgctaagcaggataataaatttagattttaaaatgttccctgtaaaagtcagcccat

SEQ ID NO: 226 - DNA, 361 bp, homo sapiens
gaaacccatgctcttactatgaaagaacgttagtacccaggttttccatgagattctctacacaggcaagaagctccatagaagtggcatttgaagggtgtggcagaggcagtgctgtgtttatcacactggttccatttccttgcaaataagaagtctatttcccagtaacccttgcagttaagagtgtgcccatgtgattgagttctagccaatggagtgtgagcaaaagtgatataagccactttcaggtctagcctttacaaacatcctcaggcttctctatccctgccaaggtgaccttggaggctgcttattccagactgggttgatagaaggtcactacttcatctgtgttgga

SEQ ID NO: 227 - DNA, 418 bp, homo sapiens
ggaactctaaaccttgtgatgactactaacaaatgtaaaattatgagtgattaagaaaacattgctttgtggttatcactttaagttttgacacctagattatagtcttagtaatagcatccactggaaaaggtgaaaatgttttattcagcatttaacttacatttgtactttagagtatttttgtataaaatccatagatttattttacatttagagtatttacactatgataaagttgtaaataattttctaagacagtttttatatagtctacagttgtcctgatttcttattgaatttgttagactagttctcttgtcttgtgatctgtgtacaattttagtcactaagactttcctccaagaactaagccaacttgatgtgaaaagcacggctgtatataatggtgatgtca

SEQ ID NO: 228 - DNA, 456 bp, homo sapiens
ttctctcttacgtctaactgactagggaacaattgttgatatgcatagcattggaatacttgtcattatatactcttacaaataacacatgaagcaagaatgaccaatattctgataattggcactggatcacaaaatgtgataaaactttaaatgtataaaactttatcaaataaagttttattttcccctttaaaatgtatttctttagaggcattacttttttaaaaatattggtcaattcctgacataagatgtgaggttcacagttgtattccagtattcaagatagattcctgatttttcaattaggaaaagtaaaatccaaaatgttagcaaaacaaagtgcaatattaaatgtttgctttatagattatattctatggctgtttgtaatttctctttttttccttttttatttggtgctgaatatgtccttgtaggctctgttttaag

SEQ ID NO: 229 - DNA, 375 bp, homo sapiens
tagtatcatagttcagtctgttccaagctgtaaagtcagttatttcagtaatgtaatttctaagatctataaaaaatgaaaatattttattttcttatataactttctgtgagagcattgaacagtcaagaaacttgtatgttttccagcccccattctgcttcaagttacatggtgtctagccttttcagctctagaaattctacattattatgtaatatcctgctttatgggtcttggtggtatatggtatagatcaactcaaaatttaaaattttcatcgtatgaatttttgtgtagagatttcaagatgagttgatctgagaacaaaaagaactccaaagaaatcttactattttcctgttggtatatatt

SEQ ID NO: 230 - DNA, 448 bp, homo sapiens
ggaatgtgggaaaaacaacctggcaaaacaaagaatctaaaggagagacagggaagagaagtaaggaaggtcatagtttggagatggagaatgagaatcttgtagaaaatggtgcagactccgatgaagatgataacagcttcctcaaacaacaatctccacaagaacccaagtctctgaattggtcgagttttgtagacaacacctttgctgaagaattcactactcagaatcagaaatcccaggatgtggaactctgggagggagaagtggtcaaagagctctctgtggaagaacagataaagagaaatcggtattatgatgaggatgaggatgaagagtgacaaattgcaatgatgctgggccttaaattcatgttagtgttagcgagccactgccctttgtcaaaatgtgatgcacataagcaggtatcccagcatgaaatgta

SEQ ID NO: 231 - DNA, 266 bp, homo sapiens
  misc_feature (236)..(238): n is a, c, g, or t
gatcttcagccaggcctttctgaaggagttattctgctaaaaatggtcttagttgtctgaaaagccagctcttgaacctcttcacaacagtatcaacactggcttctcccggttcattttatgcgtgcgagaagtcagtggtaactgctgcagggcttaatacattagtggtaactggtttaaaaaacaaagactgtaagcctgtgtgtgccactgtttgcttcaacagtatatcnnnctaataagcctcacctatttaatccaat

SEQ ID NO: 232 - DNA, 387 bp, homo sapiens
gttggagaagtcttgcagttatcttagcattgtataaacagccttaagtagagcctaagaagagaattcctttccctcctttagtccttctccattttttattttcagttatatgtgctgaaataattactggtaaaattcagggttgtggattatcttccacacatgaattttctctctcctggcacgaatataaagcacatctcttaactgcatggtgccagtgctaatgcttcatcctgttgctggcagtgggatgtggacttagaaaatcaagttctagcattttagtaggttaacactgaagttgtggttgttaggttcacaccctgttttataaacaacatcaaaatggcagaaccattgctgactttaggttcacatgag

SEQ ID NO: 233 - DNA, 513 bp, homo sapiens
  misc_feature (227)..(227): n is a, c, g, or t
aagtccagcctcctacatagatgctgccccacgaaggacccacaaaactaacctagttcagggttctcaggcaggcagttctgcttcagcttagagcagaacccataaaatactcaagtactgggataggcaagcatgtgtgtttactgtggattggtccctgaaggctcctttgggtgagaacatgtgaaccaggcaccctggtttgtttggagcattgctgcccnagaagcttctatgggataggtggtgcttgggattgatgtgttgtggccatgcagccctccctgaggattgacttctgcactaatccagtgaaggaggctgtgtcaaaagaagggctcagaagccctcttttcagaggcaatgattcctgtcagtatgaggtcccttagttactaaaaagggacatgatttaactccagtttgatgaacctcctccgagtttactttattgtcttcaaatcttttgttttcttcctttttgtgagatttgtgggttttgtgccttat

SEQ ID NO: 234 - DNA, 290 bp, homo sapiens
gaaaatatgctcaatctcacttacaattaaagaaatgcaaaccacattatcatgtgtcaccaactagacagacaaagatgaaaaagtcggctaacagtgttggcaacggcacggggaaataaggtctccacaccccactggttagagcagaaggggcacagcctcttcaggagaactggcaatagctatggaagcttaaagcaaagcctttgagccagctgctccatttctagaaattgatcgcaacaaacacacaggtgtaggtagaaggatgttcattccaagaaaat

SEQ ID NO: 235 - DNA, 557 bp, homo sapiens
  misc_feature (130)..(130): n is a, c, g, or t
ggcatagctaccgtgagttctcagcaggaacttcccagcgatgataatgtacatgaaattagccacgtaacaagagtctatttgccttgaaaaaacaattatccttgaacttcctccagctatgcagggnattctcattaaagagctgatctgcatctgtttatccattttagtagcttttaaatatgattttatgtgaagtgccatttctttattctactaaagagagacagcagaaataaagatcagaagcaaatgtgagcaaatctgttttactgttaacttcaattatgaacttgaaattgtgccacatgactttttcctctaaaaactggatcctagtgttttaattacctgtgtgcagctattttaaatagcattttacttgaataatatgtatgttgtcattgtttcatgctatactttgtgggataaaacttgggaatgagtgtggtaagaaatttataaagttttgcttttaaaacgtggacataactcatttttctagtttttgacaattgtgtgttttagtgtctagtctgcagagagctgtgtga

SEQ ID NO: 236 - DNA, 568 bp, homo sapiens
agcttgactggttggacattgcatcaaatacacgccccatgtatcctttctgtcgtaaagttaagaacgctcttgcatttgatgtggaataaatatagatgatattactatctgctattctgcctttgttctgaaacaattgctttgtcagctaatttcattcaatatttgttttttagacgatctctataagttattaatttaacctgaaaccaaagtggtctccatttaaagttacttaatccctttgtaccacctatttctagttaaatatatgttgctatgcaaataggtaaagtgcttccttgccatgatggtaatggattggaactatgaaggctctcagtgtattggcttctgtaaagatgaggcgtctcctcagaaacaaaacttttcacatttctgcttactagacctgggttgatgtacatggtaagtctcaaacagatgcaagctatgtgcaaaaagtaactttagccaaatggaaatagctggatgctttgagaattacttggttgaagtaagaaaactgtaccatcctctatcctgtgtgccataataaaatagt

SEQ ID NO: 237 - DNA, 459 bp, homo sapiens
  misc_feature (102)..(102): n is a, c, g, or t
gatgtttttgttcctatactcttgtacaagagctgatcccaaaacagtgggctactgtatcatccctatatgcttggcagttatttgcaatcgccaccaggncatttgtcaaggcttctaatcagatcagcagactacaactgattgacacgtaaaatcagtcaccgttttttccctacgattacaaaactgccagtcctatatggagtctgatcacaagactgcagtttcttcacagatctcaggaagttgtcgtggggcagaggctttttaaaaacatgtgattagggagctatctttatctgaataataacgaatttttaggtaaaacctgagatagagtactacaaaatcatgttgatgacttcagattttggaagttaaatcatgtctgttatttgcattctttagaaacttgactaagtacctgaattcatatttctattctactgtgcaaca

SEQ ID NO: 238 - DNA, 518 bp, homo sapiens
tagaattgacaaaaggccctggcaattaaattgtcaaggcccaagggctaattttaattttctttttacttggagtcattcattaatttctcacatgggattatggagtatgaagtattatctttgaatgaaattcctgggctgatctgccttacataatcacataaggtcctttgcttttctttgtgttaagagggacttgcctctgtaaatgaaaatgacaatgtgcttttcttgtagttgactttcatgtcactcactataaaataggtctcttaacctggcaccagtataactataaagcactagctgagaaggaactgatacttacatttcatggacagcattaacaagaatgagataaatttgtactttttagatcaaaacaaattacctaattgcaaaagagaaactgaaatggaacatagtctcagattcttctaatgtgtatctcacaatgtcatgtaatgtaaaggaaacccttttggaattagaattcttgttctgatgctgaacta

SEQ ID NO: 239 - DNA, 562 bp, homo sapiens
aatcctgcaattctcaatcttgcactgcagcctcgacctcccaggctccagtgactctcccacctcagcctcctaagtagctgggagtacaggcgcgcaccaccacgcctagctgatttttgtatttttttgtagagacgggggtttggccatgttgccgaggctaactcctgggattacaggcatgagctgtgctggccgggtttttttttcttgatgtaaacgtgtacagctgttttattagttaaggtctaatttttactctaggtgccttttatgttcagaactctttccactggactggtatttgctcaaaaataaataatggtagagaagaaaactataaaaatggacaaggctttcttctatcagtagcgtttaccctttgtcaccagtggctttggtatttccatgtctggcattgcataaacttctctggtgtgaaaggataaatatgcctttctaaagttgtatatcaaaattgtatcaatttttattttctatgatttctagaaacaaatgtaataaatatttttaaaatctcctttctactggttatgta

SEQ ID NO: 240 - DNA, 416 bp, homo sapiens
aatcctttaaggtcaacattgttatccttattttgctgatgaggaaactaaggttagaaacattttgatttcctctaggacgtatagctaggaagtgttactatcttgatttgaacaaattttctggtgctaagtctgatgttctttccatgaatcattgtggtggttgagatggagctttgtaatgggaataaaacagtaccttaggttctttctgaaaaggaggtatctagcaatggataaatagataccactgaatgaaattaaatgttgattaggaacaaatttaaggcttaaaaaatactttatgagcagcaagattgctttaacttttaaaatgaagctttggttctctgatttgtaatgagcacctggatatgtcaattaaaatgcccatttgtgaagcttactcaata

SEQ ID NO: 241 - DNA, 498 bp, homo sapiens
gatcgttttctgatttgtatgcttcacaaacttggatttgacaaagaaaatgtttatgatgaattgcgacagtgtattcgcaactctcctcagttcagatttgactggtttcttaagtccagaactgcaatggagctccagaggagatgtaataccttaattactttgattgaaagagaaaacatggaactagaagaaaaggagaaggcagagaaaaagaaacgaggaccaaagccttcaacacagaaacgtaaaatggatggcgcacctgatggtcgaggaagaaaaaagaagctgaaactatgaatatgtttttgtttcataatcactaactttaaaccagtagttctttaatttacgggtcttcataagatgtactgtacaatgctcaattgttatgtcatttaaagacatcaggttcatctgtttactgagctagaaacatagtatgtagtttcacttttttaaatgcaacagctgtgctgaaatttttttatc

SEQ ID NO: 242 - DNA, 281 bp, homo sapiens
ctttctggcctggaggctatccagcgtactccaaagattcaggtttactcacgtcatccagcagagaatggaaagtcaaatttcctgaattgctatgtgtctgggtttcatccatccgacattgaagttgacttactgaagaatggagagagaattgaaaaagtggagcattcagacttgtctttcagcaaggactggtctttctatctcttgtactacactgaattcacccccactgaaaaagatgagtatgcctgccgtgtgaaccatgtgactttgtc

SEQ ID NO: 243 - DNA, 518 bp, homo sapiens
  misc_feature (196)..(196): n is a, c, g, or t
  misc_feature (209)..(209): n is a, c, g, or t
gcttatgtgatgaaccatccatgattctgatattgtatttctttccagtattaacatgtgtattgtgtggccaactctgatttgtacaccgtattattgttgtaatgattcaactgttcctacatttaattgcagtttaattattatgccttttggggttaaatgatgtgaagtgtttccacctactgataaatancatatgaaaacangactaaaagactgatttaagaaacttgttatttttaaaaatatgaatttcaaaagaaatgttctcaaagacacatgcatttattttaaattcaaaaaattcttatgaatttattattgcttgtactttaactttttttattgtagacaatcctaagtgaataatgtctcatgggagaacacatgatatgtgcttgtatttgtgtaatctgatcatgcactcaatggttggaaaaggcactccagtgctaagaaaataaccagaagccaatatatcgattcttatatctcggtttatgttaccaactgaa

SEQ ID NO: 244 - DNA, 279 bp, homo sapiens
gaaaatacctgatttctgttgacaaagttactgctagtacaactgtggattgttgtctgcactcgtcattgaaggaaatactaaattttagttttaggctagtgaaattaaagttaatttttcccatccaagttcatgtatcttctgaattctatccgtgaatcccttagaggtctgtgaattgtaggttaagaacccctgccctagctaatcagatccaccaatgtttcaaataggactataacttattcaaaggccaatgatacttcgcataattca

SEQ ID NO: 245 - DNA, 378 bp, homo sapiens
  misc_feature (147)..(147): n is a, c, g, or t
cattgcatttactccacccaagagtggattttcacataatttctaaaataattttttcttatttatatactgacttttcaaaatacaaaattaaaatatcatgtctgacttcagtgatctttttctttttctttttttagaaatganatctttcagtaatcctttaatttaattttttagagatggagtcttggtgtgttacccagggtggactcaaactcccgggctcaagtgatcctcctgcctcagcctcctgcatagctgggctacaggcatgcaccaccacacctggcttagtaatccttctttattaatggtttgtcacagtacgtttgtgatgttatattgctcatggcatactttatgtgttcgaacaaa

SEQ ID NO: 246 - DNA, 519 bp, homo sapiens
  misc_feature (326)..(326): n is a, c, g, or t
  misc_feature (374)..(376): n is a, c, g, or t
  misc_feature (398)..(401): n is a, c, g, or t
gaaccacctcaatgcaaagattctacgggaaaatgtgggccccctccacctattgacaatggggacattacttcattcccgttgtcagtatatgctccagcttcatcagttgagtaccaatgccagaacttgtatcaacttgagggtaacaagcgaataacatgtagaaatggacaatggtcagaaccaccaaaatgcttacatccgtgtgtaatatcccgagaaattatggaaaattataacatagcattaaggtggacagccaaacagaagctttatttgagaacaggtgaatcagctgaatttgtgtgtaaacggggatatcngtctttcatcacgttctcacacattgcgaacaacatgttgggatgggnnnctggagtatccaacttgtgcannnngatagaatcaatcataaaatgcacacctttattcagaactttagtattaaatcagttcttaatttcatttttaagtattgttttactcctttttattcatacgtaaaattttggatta

SEQ ID NO: 247 - DNA, 506 bp, homo sapiens
  misc_feature (103)..(103): n is a, c, g, or t
  misc_feature (154)..(154): n is a, c, g, or t
  misc_feature (211)..(211): n is a, c, g, or t
  misc_feature (227)..(227): n is a, c, g, or t
  misc_feature (231)..(231): n is a, c, g, or t
  misc_feature (319)..(319): n is a, c, g, or t
  misc_feature (338)..(338): n is a, c, g, or t
  misc_feature (340)..(343): n is a, c, g, or t
  misc_feature (345)..(345): n is a, c, g, or t
  misc_feature (347)..(349): n is a, c, g, or t
  misc_feature (428)..(428): n is a, c, g, or t
  misc_feature (443)..(443): n is a, c, g, or t
aattgacctggaattattggccccaaactctgattcttgctgaagcatctatgagaagtgtgattttagccaagtctgtgccgcattctttatatgtaggaanttaagttttgatttaatgatttctgaattttctttcagctctactcaattnaggggtatcagtatgtgaaatggaatatagaaaagtaggcaattctttacttttctntattcagtttcataanattnataccccataattgcccattatataccaaagacaatatctcaagttatctcattgtagcagtgtctgtgagtcaaaacttcaattttnagtagagtcacactttctntnnnnanannnattcatgtactcactactcatgtagttactgtatctttaccttcagtttgtaaaaatgactaaaagtagggaaaacaangtgttaaaacataanggataagaaaaggttggaaatcatatggcaaatcacatgttcctcagcctcaaggtgtgttta

SEQ ID NO: 248 - DNA, 547 bp, homo sapiens
gggagaggactttctaagctctatttaggtgttagatctaattacttatagattctgtagtctggtgaaggtgtgggtgacgtgatgagaggtttgagaaatgggtgaaatgaaatgggggatatgtaggtcaaatcaaattaaagatgatttttttaatgtgaataaagttatgttctgatagtttgtacagaaaaaataaaatggatgcccatgttttattgctattactaaatgtcaagattgtatgctattatgtcttgtaaatttcttttgttggtgtaaatatggaaatgccacattggttaagtgccatcatttgtaatgcaatgtgtcacttgaaaagagatttgaagaaactgacaacttcaaaaacaaatgagaagcccaaggaactgtgagcaattaaaagcaaaccgcgacaccctttgtctccaccacacatagtgtactttggaagcacaacgtccaggctggtaccgcagcgccatgcccattcctcgcctcgttcataggacacttcactgccattttctattcacataaa

SEQ ID NO: 249 - DNA, 324 bp, homo sapiens
  misc_feature (88)..(88): n is a, c, g, or t
  misc_feature (189)..(189): n is a, c, g, or t
  misc_feature (197)..(197): n is a, c, g, or t
ttgcccgggtcctagatattgcactgtcactcctgccacctttgaccctttatcaaaacaagttttaaaaaacagcccaaattcaagnggatggagaaattgatgccacctttctgatgtgagaaatgactatgccatattgtaaagggacatggacacggagatcattaatataatgatttgcccttnccaggttnatgccttataggcatttttggtacctgtatcccttctattaaatcataagttccttgaaggcagaaattagatcttatttacctttgtatttccctttgcaacgatcacagatgttgcacgctatgc

SEQ ID NO: 250 - DNA, 131 bp, homo sapiens
tggctcatgctccaggctgcggattttattgagagaacggagactgctggtgaactctcaagagggttaattggagttttatcaagccagatttcatggtgtctgcttaatgttaatctctccaagcttcc

SEQ ID NO: 251 - DNA, 480 bp, homo sapiens
ttaatgtgccaaggagccgttttctgcctgtcaaaaccacatcagatctcttgctggtgatgtcaaacctctatagtcttaatgcaggatctctgacaatgagtgaaaagcgggaatttcctacagtgcccttggttaaattaggcagttcttttacgaaggttcaagattatctaagaagatttgaaagtataccagatatgcttgaattggatcacctcacagtttcaggagatgtgacatttggaaaaaatgtttcattaaagggaacggttatcatcattgcaaatcatggtgacagaattgatatcccacctggagcagtattagagaacaagatagtgtctggaaaccttcgcatcttggaccactgaaatgaaaaatactgtggacacttaaataatgggctagtttcttacaatgaaatgttctctaggatttaggcactaaaaggtactttactatgttactgtaccctgc

SEQ ID NO: 252 - DNA, 517 bp, homo sapiens
gaacagtctaattggggcattgaggaaatgaagactggatacttctgtatctgtgaagttggcacaggtaacatttggacatgttcatcttattcttaggaaggaaaaaatcacttgccaaaataatacatacttcatagaccactgagttctagtttttattcacactacaacattctctttaacgatgttgcaggtattctcaatttccttttaagaaaaatgaaatgtgaggagaattctggttgtaatagatgacagtacatatgatctgcaggtttgggcatatgctttcatcattaaattatctgataaagttacaagtcacaaaggagaatgagaacttaatgattctattggatttaatatattagcaagaaaacatactatttacatatgtgtagcttagtaaggcattaacataagtacaaaaactatgaaacagatgcatatttcctcaacatactgtgtcaggtatactgttttataatttggttgttttagccttattgcacac

SEQ ID NO: 253 - DNA, 397 bp, homo sapiens
  misc_feature (60)..(60): n is a, c, g, or t
  misc_feature (85)..(86): n is a, c, g, or t
  misc_feature (102)..(102): n is a, c, g, or t
ttatgagagccatttggtctgagtaacatgtatagggtatgactaaagtaggtggtaagnccaaaaagagtaagtgaggtaaggnnggggtgggttagtggntttaaaaaagtaatttgtagctctaccttcaggaaatgtcagtgattcaacattcaaatctacctaatcaactgtatctttactacctatataagttttgtatgtgagagaatgattctcattttgtatatgtgcatattcagtcttctgattcataggtcctaaatgcttttgtatttatttaggcttattttgaagcccagaatatggtcttttgtggtaaatgttccatttgagctcttgaaaagaatgtatattctggtggttttggacagattgtgctgtaactatcaat

SEQ ID NO: 254 - DNA, 332 bp, homo sapiens
  misc_feature (148)..(148): n is a, c, g, or t
  misc_feature (165)..(165): n is a, c, g, or t
aagtgcatctttctgcctacaagaatcacatgacccctttcaataatttatgtagtagagaaaaacacactatttctcatagagttttcagtcatgtgctgtggtgtgattgtttctggacattcataaaattttatagttaactganttctcttttctgttttnttgctatttaacgtccattgaaaacatggctttcttttgcgcattctgttactttcagctgtactttctaataagaatggattgccctttttagcaatctttgattgaactggtacatttcagattacttaaatgtcatcaggccacacagcataccaggtaacaga

SEQ ID NO: 255 - DNA, 396 bp, homo sapiens
gaaactgctgctgaaatggttccaatttttaggaatctgcttacccacttcattatttgacagctttccttggtgacccaaaccttgtagcctaagccatttgtctttttctcagtggagggagtgtatggacctggccccatggctttgcatgttagagacctggcagactaaagtctctagtgtttgtttgctcacatttgctgagtgacagctatgtgccagactgcataaagggtggtggcagaagtgaaaatgtttaagaatgaccaaaaacattagtaatgaaagttaatgtgttccaggcattcttctaagtggtttacatgcactgtctcatttaatctgagataaaggatacttaagcccaaactatatctaaacccaaatctcact

SEQ ID NO: 256 - DNA, 489 bp, homo sapiens
  misc_feature (118)..(118): n is a, c, g, or t
  misc_feature (129)..(129): n is a, c, g, or t
  misc_feature (134)..(134): n is a, c, g, or t
  misc_feature (141)..(141): n is a, c, g, or t
  misc_feature (204)..(204): n is a, c, g, or t
aactgtcattgcgttagctttatgttgaattgggaaattgtggcataaagcttaaattcgtgtttatcaaatgtgaaccatagtagtataatgctgctttgtatataatgtaagtgcnacaaatagtcncagcnctgaaantgtattgatacctcttaaatgaatgcaacttttgatgtaggtgttttgctatgcctcagaaantatctgtctgagaatttgttaatctgtttgataatgaagatacttcctgttttcttgtttcatattttcatgttcaaaatttaagttttacatttttactactgttaatttaaataaaatttgttctgtggataaaatgaggttggcagtgaagaaaattaaaaacagcctcattcatgtaactggttaagtaaaaatacattttcactatgtgttcataaacttttaatgaagctgtttgtctttcagttcaaatataagtgatgtttaggctttatttctgtt

SEQ ID NO: 257 - DNA, 407 bp, homo sapiens
gtctacttttagagagcactagccagtatatgaccatgtgattaatttcttttcacactagataaaattacctggttcaaaagtggtttttgtttattaaatttggtaataaatatatataatacacagacaggatagtttttatgctgaagtttttggccagctttagtttgaggactccttgataagcttgctaaactttcagagtgccctgagacacttccagccatccctcctcctgccttcattggggcagacttgcattgcagtctgacagtaattttttttctgattgagaattatgtaaattcaatacaatgtcagtttttaaaagtcaaagttagatcaagagaatatttcagagttttggtttacacatcaagaaacagacacacatacctaggaaa

SEQ ID NO: 258 - DNA, 250 bp, homo sapiens
ttcagaatatcacatcctctccaattctctcttactcaaattgctgggaaactctcatgttactaactttgttgctctaactctgccatcttggtttccccatcccttctcttcctcatggtacgtgtgctcctaatattagcgttggttgagattttcagtggtccaatattcctcttccctctggttgcctttcctgagataatccactaagaatattttgtgtttcttttctcagggaatctaaggg

SEQ ID NO: 259 - DNA, 478 bp, homo sapiens
aatatctttcagtatcattgtaataattttttagagtttaatttgtaaagcttagcaaataaaatcttgtactatgaatagcttcttgctttatgactttaggattaacttgtaaaaaacatatcctgaactgagatatgcaaaatactcattttcaagttatggaaatgtgtttgtggcatataggactgtggggtctgtgtgtgtagtgagagtgtgtagccactattataactggaatttaatttacattcataaactactatatttcccatcttgcaaatcattttatgtctcatctgtttttcctttcggttatatctttggttttgaataccaacatttaaaatgatggtattttatcttttaaacttaaaaattatttaatacagctatatggaccttataaaattgatttcttatttattattagacattactactaaaaggtacatctaactattcagggacatttttc

SEQ ID NO: 260 - DNA, 398 bp, homo sapiens
cctctttctcaatctataacctttgtaggcatgcatttataccagcatgttttataaattatgagtttctatctgtgtccatgaagtcttactagttttcacttaaacttttgtgggttgttaagaagaattaaagtgattcataacttcacgcttgaacctgggaggtggaggttgcagtgagccgagatcatgccattgcactccagcctgggcaacaagagtgaaactctgtcttaaataaataaataaagtggttcataacatcagatgaagaaggaggtgagtgatatgttaaatgatcagaaacttggcattacattatttccaggaccatttccctaccaaagctgtgtatttttcatttcttcatggcactgtgctgttaatttctgtta

SEQ ID NO: 261 - DNA, 411 bp, homo sapiens
  misc_feature (164)..(164): n is a, c, g, or t
  misc_feature (173)..(173): n is a, c, g, or t
  misc_feature (216)..(217): n is a, c, g, or t
gagttattatgttatcactgtgtctgatgttatctactttgaaaggcagtccagaaaagtgttctaagtgaactcttaagatctattttagataatttcaactaattaaataacctgttttactgcctgtacattccacattaataaagcgataccaatcttanatgaatgcnaatattactaaaatgcactgatatcacttcttcttcccctgtnnaaaagctttctcatgatcatatttcacccacatctcaccttgaagaaacttacaggtagacttaccttttcacttgtggaattaatcatatttaaatcttactttaaggctcaataaataatactcataatgtctcattttagtgactcctaaggctagtccttttataaacaactttttctgacatagcattt

SEQ ID NO: 262 - DNA, 478 bp, homo sapiens
attgcattttgaccatgttcctgtttacaaaacctaagattatattctgaagtatctgtgacttgagtgatagctcaggaataatctgagggcattctattaggaaggaggactagcaaagcctatagttagcctatcctaggcatgaactattctcattttagataggatgacttgataaataggatgaagtgagcaacctgtttgtcttcggttattggtatctacaagacattctgctagtcactgtggaaaagtttccttctcttgggttttttcctcttccccttcctcttaacagtgttggttatctttattatgtttctgtgtatttgtaacagctgtttcacccttgtattgcataatggggatttttcttggaataaaaagtgaggcatgtaaattcattgagaactaaccgtagtttgtaaagaagtaaaaggcctttgtatctagttttttgcagatcacatttctt

SEQ ID NO: 263 - DNA, 278 bp, homo sapiens
gatctggtgcggaacctgcaaagtgaggtggagggagttaagaatattatgacccagaatgtggagcggatcctggcccggggggaaaacttggaacatctccgcaacaagacagaggatctggaagccacatctgagcacttcaagacgacatcgcagaaggtggctcgaaaattctggtggaagaacgtgaagatgattgtccttatctgcgtgattgtttttatcatcatcctcttcattgtgctctttgccactggtgccttctcttaaagtaa

SEQ ID NO: 264 - DNA, 418 bp, homo sapiens
  misc_feature (173)..(176): n is a, c, g, or t
gatagtagattgtttctttagaaactgggcagaagctctgcattctcacttgtactttgatttcttatttcttgggcaggcaatttgaggaaagaagaaatggcatggggaatatatatgttttgtttcttagggaaaacagtctgagaaatgaataaaaagcatgaagtacnnnngtgtgtgtgtgtgtgtgttaccatggaaaaggatattcacagtagtacagttctcaatatttttaattagatgtcatatttttttaatatagtaaaaccttgggatatagaatattacatcttttgagaatgtatgtgtctctaagtaagtaaaatctaatgcgtataggagactgatagctaaaaatgaatggaacattaatgtacttttataattaaacctcttatctatcagaaattgt

SEQ ID NO: 265 - DNA, 461 bp, homo sapiens
  misc_feature (71)..(71): n is a, c, g, or t
  misc_feature (161)..(161): n is a, c, g, or t
gtgttttgtcttaaaccctactgctggaaacaattttatgtaataagcaatgggcccaaaagtctaggagnttttttgtacttagtgaatttgtatgcaacagagatgctgcagctgatgcctttaaaaggtattcatcatggaagagctgaggcctgtgncttggtgttccagagcccagggttgagcatcctgaaggagccactgcagccgtcactgtccccagagcctgtggagatagagcctgtttgctgctttttcttcccgctcttaagacatggctggagctcagtcttcattgaatgaagtttgctgtggtattgcatagccttgctttcttgaactaaactgtttgcccttcacaagtagttcttctttcaggattagttcgttccaaggaggctcttcagtctcacagataagtagatctctcctgctgtctggacacatttcactcggaa

SEQ ID NO: 266 - DNA, 525 bp, homo sapiens
tgagccctggtagtccagagaccccaactctgccctggcttctctggttcttccctgtggaaagcccatcctgagacatcttgctggaaccaaggcaatcctggatgtcctggtactgacccacccgtctgtgaatgtgtccactctcttctgcccccagccatatttggggaggatggacaactacaataggtaagaaaatgcagccggagcctcagtccccagcagagcctgtgtctcaccccctcacaggacagagctgtatctgcatagagctggtctcactgtggcgcaggccccggggggagtgcctgtgctgtcaggaagagggggtgctggtttgagggccaccactgcagttctgctaggtctgcttcctgcccaggaaggtgcctgcacatgagaggagagaaatacacgtctgataagacttcatgaaataataattatagcaaagaacagtttggtggtcttttctcttccactgatttttctgtaatgacattatacctttattacctcttt

SEQ ID NO: 267 - DNA, 532 bp, homo sapiens
ttgatctttgtttaactgaacagcaaatgaaagaagctcagaagtggaatcagccatggcttgaatttgatatgatgagggaatatgatacttcaaaaattgaagctgcaatatggaaggaaattgaagcgtcgaaaaggtcttgattctgagaatgaatttggttagttgcagaagatacattggctctaagaggatatattttgagaccaatttaatttcatttataagaacatagtaattaagtgaactaagcattcattgttttattaatactttttttctaaaataaaacttgtacaccagtttattactctaaaaagagaattacacatgccaaatggaccaatgtccatttgcttattggaggcaaagctacaatagaagtcagagcatcaccagaatggtctttaatgagcatggaacctgagcaaagggaataggtgggatgaattttttttttaattgtgaaacaattcataagcacaatatgatttacagaataataaacattcatgtacccactatcagg

SEQ ID NO: 268 - DNA, 517 bp, homo sapiens
cagaagtcattttcttccttactttagtggtttctggtttagttagtttgggccaaactgtggacaagtaccttttcaggtaacttttttttcttatttctatgtcctcaacacctagtggagtacgtagccaatagtagatgcttaataaacatttcttaaattaatattgttgaccttttctgaccctgttcttgacagtaaggtacataatctgccttcatccctttagtccttaggaacagataaagtcatggatatgaaagtgatcactgtcattaatatccacattaaaattgctcttgattttagtttctccataatcattttccctaaacaatgaactctgttcacctttttttttaaaatatgcacagtgaatattactggtagcccaaatcttctaacataaaatttccattttgtaaaagcttctgataagcatatatgttatgaattgaatgtttgattattatactttaatattcttgaaaatattgatacctggactggaaag

SEQ ID NO: 269 - DNA, 63 bp, homo sapiens
gggaagatttgaattccattgaattcatggaagcaggaatccatctggtcatattttaaataa

SEQ ID NO: 270 - DNA, 240 bp, homo sapiens
  misc_feature (34)..(34): n is a, c, g, or t
  misc_feature (40)..(40): n is a, c, g, or t
  misc_feature (72)..(72): n is a, c, g, or t
  misc_feature (85)..(85): n is a, c, g, or t
  misc_feature (87)..(91): n is a, c, g, or t
  misc_feature (93)..(93): n is a, c, g, or t
  misc_feature (166)..(166): n is a, c, g, or t
  misc_feature (176)..(176): n is a, c, g, or t
  misc_feature (190)..(191): n is a, c, g, or t
  misc_feature (197)..(197): n is a, c, g, or t
agtcccaggtactcgaatgggctgcttgctgtgnactcangggtccgtgagtctgctcatcttcttcagttngcgtttcattttngnnnnntntgtttccacgtcttcaagcccactgatcttttaagctgctgttaagctatggccattttctgtatgagccatngtgttttttncatctctataaatnnggtttnggtatttaaaaaaatgtcttccagctaggctggcggctcacac

SEQ ID NO: 271 - DNA, 421 bp, homo sapiens
  misc_feature (105)..(105): n is a, c, g, or t
attgctttcgtgtccacaagacctggcacatagacgatgctcaataaatattatttgaaggagtgaatgatggtgacatggttcttaggagttaaaatgagaaancccaaggagccgaaagcatgtctctacggggaaaggttagagagcactgactcaaaccatcgtctccaattatgcagttttaatgaggaagcaagcccaaccttgaacattatttaagccagagttatcccaataagcattttcctaccatgagtggtagattaagtagcattgagtcatgtagtgaaagtaatgtcccttcttcataccatttcaatgcctctggtaagtcaagagaaagtctttgataatagcctatttttaacacctctcacccttgtttgtcagaaagagcagacctcagattcagagactt

SEQ ID NO: 272 - DNA, 420 bp, homo sapiens
  misc_feature (378)..(378): n is a, c, g, or t
taagaagaaagattgaacccccatttccttaattatttcaggaataattctcccgaaatcaggtcaaccccatcaccaaccaaccaaccagttgagttccagattctatgtgaattaaaaagtcaatatatgtataattctgagatgacttaggttggacattcaatgttgtgctatgaatttcctctttatgcagagtatctgtttgcttgcagagtggctttctggcttgctgccagcctgtgcatggtccacgcttatgagttcaggatctacggcaatgtgaatcattcagatgtttacaataaaaaacaccacatgagtaaatgaattcactaatgttaatgttaaacttcatggaaaaatagtcctttgaancttcggtggttagcaattaaagaccctgagttatgtgcaata

SEQ ID NO: 273 - DNA, 257 bp, homo sapiens
agaaattccgttcctcagttggactagctcagtgtcaagtgctcagaagtcacttgtgaacacactgtggcaattcctcaaaaaacgaaaactagaaccaccgtagcatcccataattccacttctgggtgtggattcaaaagaatgcacagcatcttaaagagctagagatatttgtacacccacattcatagcggctctgttcacagtagccagcgggtagaaacaacccgaatgcccgcggtcaaatgaatgga

SEQ ID NO: 274 - DNA, 510 bp, homo sapiens
gagctcacagcacaagtgtatcactgtttaatgttacccaacaagagttagtgttaagtgatgatcaagttcccatttcacctgctctacttttgctgcattaattaatgacacccggatgaggagacgtgcgctaacttcattgctcatctgggatagtgcatgagcccattgaattagagctgctcctactagataactgagcagtacacataagtgcatgttatgaaacatgaatcacatagagcagtggagttttaccaagtggtgtgtgtggtttttgttttttactatgcaaagatgggaaatgcacaaacttttcaaagactagtgtctgaagaactttacaaacaatacttgaaccctttctttaaagttatcccatcatgttttatagtcattgttgcttccattgttagtttccattttcaagtgctttgtaattttttaagtgcactacctgaaattttgtttgaaattaataaattcattcgtatcttgttggctgcc

SEQ ID NO: 275 - DNA, 417 bp, homo sapiens
attgtaaatcttttgtgtctcctgaagacttcccttaaaattagctctgagtgaaaaatcaaaagagacaaaagacatcttcgaatccatatttcaagcctggtagaattggcttttctagcagaacctttccaaaagttttatattgagattcataacaacaccaagaattgattttgtagccaacattcattcaatactgttatatcagaggagtaggagagaggaaacatttgacttatctggaaaagcaaaatgtacttaagaataagaataacatggtccattcacctttatgttatagatatgtctttgtgtaaatcatttgttttgagttttcaaagaatagcccattgttcattcttgtgctgtacaatgaccactgttattgttactttgacttttcagagcacaccc

SEQ ID NO: 276 - DNA, 379 bp, homo sapiens
  misc_feature (40)..(40): n is a, c, g, or t
  misc_feature (42)..(44): n is a, c, g, or t
  misc_feature (281)..(281): n is a, c, g, or t
cgctttgccttgcttgggaaatgcagtttcgtgtcacctntnnnagaagatatgtagttgatcatctagacataattgctgaagatgaacttttggaccaacttctaagtcacacagcatcattatcagatttattacacaacgacttttttgttttcactctatttctgaggaaaaagccttcccgaaatccgtaatgaatttctccatggtaacccctcttctgttttcacacagaaaagtttctctagactgttgctaagatgcattttgttaaatanccccccccccacaaaggctgctttgtattaaatacgtagttggaatttactaaattgtgaaattaacgtaaccgaagcaacaaccggcaagacttttc

SEQ ID NO: 277 - DNA, 341 bp, homo sapiens
tgtagaagcagccctttccatataccttgaaaactatgcaaccagcatggggtctcgggaacagcttgcgattgcagagtttgcaagatcacttcttgttattcccaatacactagcagttaatgctgcccaggactccacagatctggttgcaaaattaagagcttttcataatgaggcccaggttaacccagaacgtaaaaatctaaaatggattggtcttgatttgagcaatggtaaacctcgagacaacaaacaagcaggggtgtttgaaccaaccatagttaaagttaagagtttgaaatttgcaacagaagctgcaatcaccattcttcgaattg

SEQ ID NO: 278 - DNA, 483 bp, homo sapiens
  misc_feature (232)..(232): n is a, c, g, or t
catttggtaatattgctttggttcaaagaattttatgtctttatctttctagaagaaagcaattatatatatatttttgctaaattacataaacatttaattacatcaggttctaatttaaacatgtattactcacttgaggccacttttaaatattcatactctttgacataagatgctttgtatatttctcatttcttttagttcttagtaagtcagctttaaaaagtanctgccaaccagaaccttccatattctggactaaatcttgctcttcggattatacttcagtgcagtaactgtggatttgcaattttgaaggggagatagtagctattatattttacacttgcttgatgtgataactctaaagactttttaactgataaaagcgcacatggctattttgatacacaaagttgtgtttgctactttagaagcttttgtggcagaattgtaatctaattttcataccttgtattt

SEQ ID NO: 279 - DNA, 503 bp, homo sapiens
agcccctgcccatctgggaaaataccccatcattcatgctactgccaacctggggagccagggctatgggagcagcttttttttcccccctagaaacgtttggaacaatgtaaaactttaaagctcgaaaacaattgtaataatgctaaagaaaaagtcatccaatctaaccacatcaatattgtcattcctgtattcacccgtccagaccttgttcacactctcacatgtttagagttgcaatcgtaatgtacagatggttttataatctgatttgttttcctcttaacgttagaccacaaatagtgctcgctttctatgtagtttggtaattatcattttagaagactctaccagactgtgtattcattgaagtcagatgtggtaactgttaaattgctgtgtatctgatagctctttggcagtctatatgtttgtataatgaatgagagaataagtcatgttccttcaagatcatgtaccccaatttacttgccattact

SEQ ID NO: 280 - DNA, 227 bp, homo sapiens
gaagaaatgtggtcgtttgaggaacttcgagatcagcgtggccactgatgtgctgcagtgtagcaaagagagcaaaagaaagagagaaacagggaggaatggaattcagctcacgggctctggaatcagagtttcaagttggaatcctgacttcctagctgtatcggttaagaatttttttttgtggcatccaaagaacagaaagcctaccttactgaggttcatat

SEQ ID NO: 281 - DNA, 467 bp, homo sapiens
  misc_feature (153)..(153): n is a, c, g, or t
  misc_feature (164)..(164): n is a, c, g, or t
  misc_feature (186)..(186): n is a, c, g, or t
ggaaaggattcttggacctctaccaaaacatatgatacagaaaaccaggaaacgtaaatattttcaccacgatcgattagactgggatgaacacagttctgccggcagatatgtttcaagacgctgtaaacctctgaaggaatttatgctttnctcaagatgtngaacatgagcgtctctttgacntcattcagaaaatgttggagtatgatccagccaaaagaattactctcagagaagccttaaagcatcctttctttgaccttctgaagaaaagtatatagatctgtaattggacagctctctcgaagagatcttacagactgtatcagtctaatttttaaattttaagttattttgtacagctttgtaaattcttaacatttttatattgccatgtttattttgtttgggtaatttggttcattaagtacatagctaaggtaatgaacatctttttcagtaat

SEQ ID NO: 282 - DNA, 499 bp, homo sapiens
ctgagccctggtagtccaaagaccccaactctgccctggcttctctggttcttccctgtggaaagcccatcctgagacatcttgctggaaccaaggcaatcctggatgtcctggtactgacccacccctctgtgaatgtgtccactctcttctgcccccagccatatttggggaggatggacaactacaataggtaagaaaatgcagccggagcctcagtccccagcagagcctgtgtctcaccccctcacaggacagagctgtatctgcataaagctggtctcactgtggcgcaggccccggggggagtgcctgtgctgtcaggaaaagggggtgctggtttgagggccaccactgcagttctgctaggtctgcttcctgcccaggaaggtgcctgcacatgaaaggagagaaatacacgtctgataagacttcatgaaataataattatagcaaagaacagtttggtggtcttttctcttccactgatttttctgta

SEQ ID NO: 283 - DNA, 290 bp, homo sapiens
gtttactgattggtgcttctaaggactggtttgcttgtacctgagacacgttgcctactatcagtttggtcctgcctgcactctggagaagccacaagaatcttgacttttgctcatacacgacactgttgcaatgctgctcctctttggaagctctttggacaattataaatactcttttttttgcaactgccctgtatacaaatatatttacaaatacatataatcccacgtgctacttcaaagttcttacctggcactataggaccaactgctattgaatcttcaag

SEQ ID NO: 284 - DNA, 498 bp, homo sapiens
  misc_feature (65)..(65): n is a, c, g, or t
tctcttttgagaacaactgcttatttgttataaaagcatttggttaaaatgatgtcatcataaanaacagtggctttgtttcaatacatatttttgagatgattatctagaagccagattaataaaatcagcttgtgaccttgctaagcatataaactggaaattcagatacattcaaaattatgggttcatttaaaagtgttctaccttttgggtatgagactaatatcactaattcctcaatagttatcatggctctatcttaattaattagaaaatatgtgtgtttaattctttgagaattaaaatagagaatattaacagagggttaaaaactgcttcaactccaataagataaaggaagctcaaaatctatgagctgagtgttcaattagctttgcctactgagttcaattttatgtcaatacaacagtggatcagacagtacgactttgaactggtgaatgtaaacaattgtttttcacctaagctgctttg

SEQ ID NO: 285 - DNA, 135 bp, homo sapiens
gaggcaaatggatctcgatatttcagatgggcttttgatgcactgttgccaaggaaggctttttctgattttttgacaaatgaatttttgcacactttcattggtgtctttcggcaacttacacacattgaaaat

SEQ ID NO: 286 - DNA, 552 bp, homo sapiens
gtcactgcctaataaatatagcactaaagtaggagacaaaggaactcagctctctggtggccagaaacaacgcattgccatagctcgtgcccttgttagacagcctcatattttgcttttggatgaagccacgtcagctctggatacagaaagtgaaaaggttgtccaagaagccctggacaaagccagagaaggccgcacctgcattgtgattgctcaccgcctgtccaccatccagaatgcagacttaatagtggtgtttcagaatggcagagtcaaggagcatggcacgcatcagcagctgctggcacagaaaggcatctatttttcaatggtcagtgtccaggctggaacaaagcgccagtgaactctgactgtatgagatgttaaatactttttaatatttgtttagatatgacatttattcaaagttaaaagcaaacacttacagaattatgaagaggtatctgtttaacatttcctcagtcaagttcagagtcttcagagacttcgtaattaaaggaacagagtgagagacatcatcaagtggag

SEQ ID NO: 287 - DNA, 478 bp, homo sapiens
acattcgagcaatatcaattcctatatgacgtcattgccagcacctaccctgctcagaatggacaagtaaagaaaaacaaccatcaagaagataaaattgaatttgataatgaagtggacaaagtaaagcaggatgctaattgtgttaatccacttggtgccccagaaaagctccctgaagcaaaggaacaggctgaaggttctgaacccacgagtggcactgaggggccagaacattctgtcaatggtcctgcaagtccagctttaaatcaaggttcataggaaaagacataaatgaggaaactccaaacctcctgttagctgttatttctatttttgtagaagtaggaagtgaaaataggtatacagtggattaattaaatgcagcgaaccaatatttgtagaagggttatattttactactgtggaaaaatatttaagatagttttgccagaacagtttgtacagacgtatgctt

SEQ ID NO: 288 - DNA, 137 bp, homo sapiens
gattatgggcagtttgactgtccttaattaagcctaacagacaagtggaccaaagttaagctgtttcctgttgtgctgaactgttgtccgttgaaacacattgattcccctccccctacttattgccacagaggagg

SEQ ID NO: 289 - DNA, 437 bp, homo sapiens
  misc_feature (137)..(137): n is a, c, g, or t
taaattgtccctcgtattatttctccacgtctgttttagtttaatgtctcctaagcttttctctcatagcgtagacctagggaagggatgggaagattgcccagtccccgatggctgcgcacacaggaggcggcggngcacaaggcaagtgagtttgcactgtcagccccagaccgtaagcttggctacactgatgtttttctttactaaggatactattcaaaaattaacattttcatctcagtaagtttttagaacatcaaaatgttttctgagctccaagtggctaggttgtaaaagttttataataatttgcaattaaaatacatgatacatattaatccattaaagactagtgggaatgtatcagccagagtagcaagtaatttttgttttataaatcatagtatctgtcatcttgcagtattaccaatgct

SEQ ID NO: 290 - DNA, 563 bp, homo sapiens
gtgcatgcttcgctaccagaagtgtctggatgcccgttcccaggcctccacctcctgcctcccagcaccccctgctgagtctgtggcacggcgtgtagggtggactgtccgcaggggtgttcagtcgctgtggggctccctgaagcccaaacggctgggggcccataccccatgaagaagcccccaccttcccttccacctgattgtgttgggccccagggaactaaagggtgtgggtcagggaggggtctagaggctattcctaggcctcaggcctcccaaatatgcccctccccagtaggtacggttccctgcctaggagctggggagggagagatctaatcccttcaaggaagtgataacactggagtggtaacaagaggagcaggaagcaaggccagccctggttctccatccccatgtgtttcaggtggaacaggaggaactggtccaggccaggcctcatcctcctggacccagcaggggcagaaggaggaagggactggtccaggcatgggtcccttccccctgctccatgggcacctctgctgtattgatatcac

SEQ ID NO: 291 - DNA, 185 bp, homo sapiens
ctgatgccatcaaagaggtcttcgacaataaattccacatcatcggcgcagtgggcatcggcattgccgtggtcatgatatttggcatgatcttcagtatgatcttgtgctgtgctatccgcaggaaccgcgagatggtctagagtcagcttacatccctgagcaggaaagtttacccatgaaga

SEQ ID NO: 292 - DNA, 325 bp, homo sapiens
  misc_feature (283)..(286): n is a, c, g, or t
  misc_feature (291)..(291): n is a, c, g, or t
  misc_feature (293)..(295): n is a, c, g, or t
aatatgccgaaatagcttcagagtaattatgaattgccttccaaaaaccactgttttgcacttgcctgcaagaataggaaaaacaaaaggactgtaaggtggcaggatggcagaaccaaacaagagtagtacaccttggagttttttcgaaatatgggttgggtttttgggctcttggttgatttaaaataaaatttaaatgccttcagcgtctgtgataggtgccaacatgaagctaccgagttccagagaaagaggggagagctgatcactcatcagtgcnnnnagacnannnaagggcccttcaggacctatctgttctttg

SEQ ID NO: 293 - DNA, 531 bp, homo sapiens
tcatgcagcgcaattacctacaagatgagaatgaaaatcgcacaggaactctgcaacaattagcaaagcgcttctgtcaatatgtggtaaaacaatcagaactaaagggcactttcaaaggtcataaatgcagcccctgtgacacaaactggagatattatggagatagctgctatgggttcttcaggcacaacttaacatgggaagagagtaagcagtactgcactgacatgaatgctactctcctgaagattgacaaccggaacattgtggagtacatcaaagccaggactcatttaattcgttgggtcggattatctcgccagaagtcgaatgaggtctggaagtgggaggatggctcggttatctcagaaaatatgtttgagtttttggaagatggaaaaggaaatatgaattgtgcttattttcataatgggaaaatgcaccctaccttctgtgagaacaaacattatttaatgtgtgagaggaaggctggcatgaccaaggtggaccaactaccttaatgcaaag

SEQ ID NO: 294 - DNA, 501 bp, homo sapiens
atgaatgattgctttcgcttctacagtgcaaggatttttttgtacaaaacttttttaaatataaatgttaagaaaaattttttttaaaaaacacttcattatgtttaggggggaactgcattttagggttccattgtcttggtggtgttacaagacttgttatccatttaaaaatggtagtggaaattctatgccttggatacacaccgctcttcaggttgtaaaaaaaaaaaacatacattggggaaaggtttaagattatatagtacttaaatataggaaaatgcacactcatgttgattcctatgctaaaatacatttatggtcttttttctgtatttctagaatggtatttgaattaaatgttcatctagtgttaggcactatagtatttatattgaagcttgtatttttaactgttgcttgttctcttaaaaggtatcaatgtaccttttttggtagtggaaaaaaaaaagacaggctgccacagtatattttttt

SEQ ID NO: 295 - DNA, 209 bp, homo sapiens
taatacaaatgggctctttgttttttgtcgtttgataactttaatcctcacttctcaggaaacattgcacatcagtaaatatctgcagtcttgtgcacatggtggttgccctcaggatggtattcaataggaactgtatttctttttccttgaggtagggtcttggtctgtcgccaaggcaggagtgcacggcgcagatgtatatacat

SEQ ID NO: 296 - DNA, 435 bp, homo sapiens
gccatgcgcaacctctatgcgatgcaccggcggctgcagcggcacccgcgctcctgcaccagggactgtgccgagccgcgcgcggacgggagggaagcgtcccctcagcccctggaggagctggatcacctcctgctgctggcgctgatgaccgtgctcttcactatgtgttctctgcccgtaatttatcgcgcttactatggagcatttaaggatgtcaaggagaaaaacaggacctctgaagaagcagaagacctccgagccttgcgatttctatctgtgatttcaattgtggacccttggatttttatcattttcagatctccagtatttcggatattttttcacaagattttcattagacctcttaggtacaggagccggtgcagcaattccactaacatggaatccagtctgtgacagtgtttttcactc

SEQ ID NO: 297 - DNA, 498 bp, homo sapiens
  misc_feature (88)..(88): n is a, c, g, or t
gtatgtctgccttaccagttattcacaaaaacttatatgaaacgcagtcctcctcagagtcattcaggaatacaaactgaactgtgtnccgtattatatctttcattaaaagacactgtaaaaacagatacatggggttcaggaaatgtgagggtcacacaggggcacggaggccaaaatccaatggagaagtgaaacagccttttttccaaaatcaaagtagcactcaaaaaaaccgtagtgcataaagaattgacgctgcagtttcattttttatttcctcctgctgtggacagactgtttcgctggcggaatgtcggttacctaggtgacagctccacagccatggcgactgctccaggccccacagacgctcagggccgagccccggcctgtggatgccgatccctggccactctacccaccagagaagttccagggagaaaggaacgctgccaaccaaagaggtcattctaaacctcggcaaactggggctct

SEQ ID NO: 298 - DNA, 441 bp, homo sapiens
  misc_feature (137)..(137): n is a, c, g, or t
  misc_feature (278)..(278): n is a, c, g, or t
gtacccgctagtgaggtgtttgagctggtcagcaaggagagggggtggggttccgcggaaggttctggaggggtcttggtaggtctgcagtgaaccgtcctgaggatggagtggggtcccatggtgcaggtctctgnagcaaggcggaggtgtggaggagaggccggcttggggtggggcctcgcgccctagtgccggccggcctcagcccggctctgcctggtgctccctgcagtgccttctccatggccccgccctccccgcgtgtgcgccaggcntggggtccccgggagagcagagcttgcgcctcgggcatagggacgtggggtgcaggcgccaacatcagtggcagcagccagggccgtggtccagtcccactcggggatggagtgggccggcggccaaaccagtcactcggggaggaatgcggaggagcgctca

SEQ ID NO: 299 - DNA, 453 bp, homo sapiens
ggaagagaggtggaacagtgctgttattttaaacagaaggttgtattattatgttgttttgttttttttactattgcttgattaaatttggcatttaaatagtggtggaaatatttttatataattttcattttttggttgtgcagttccttggctactgtttttcttttacttcagttttttaaaaatctcaaatgaaaaagtcttcgatacaatattgttaagctgtattataagtattgttacacagggttatgcaattcccggcctggagcatttttgaaattcaaattgtctgtcctgtggagcaggcagtgattttgttccaaaactttgtatacacatttggagaaaagtactttatattttcagtgttttgtctgattttaatgtccgttcttagccaagctgctagcaggtgttaattggatccctttccttcactgaaatgga

SEQ ID NO: 300 - DNA, 354 bp, homo sapiens
  misc_feature (38)..(38): n is a, c, g, or t
  misc_feature (40)..(40): n is a, c, g, or t
  misc_feature (45)..(45): n is a, c, g, or t
  misc_feature (50)..(50): n is a, c, g, or t
  misc_feature (53)..(53): n is a, c, g, or t
  misc_feature (56)..(56): n is a, c, g, or t
  misc_feature (63)..(63): n is a, c, g, or t
  misc_feature (71)..(71): n is a, c, g, or t
  misc_feature (73)..(73): n is a, c, g, or t
  misc_feature (88)..(88): n is a, c, g, or t
  misc_feature (97)..(97): n is a, c, g, or t
  misc_feature (102)..(102): n is a, c, g, or t
  misc_feature (164)..(164): n is a, c, g, or t
ggagctgacacaatgagtgacacgagttctgtaagctngnaagtnagccntgncanccgggangacttcangntgccacactgtcacntggggcgtncagcngtggctgggatgacggtgacacccgcagcgagcacagctacagcgagtcaggcgccagcggnctcctcttttgaggagctggacttggagggcgaggggcccttaggggagtcacggctggaccctgggactgagcccctggggactaccaagtggctctgggagcccactgcccctgagaagggcaaggagtaacccatggcctgcaccctcctgcagtgcagttgctgaggaactgagcagactctccag

SEQ ID NO: 301 - DNA, 93 bp, homo sapiens
atagagaatcatatggtcacagtcaactttttaaaaaagctttccagccttcgtaactgtctttctttcatgtcttcttagctacttgctgtt

SEQ ID NO: 302 - DNA, 333 bp, homo sapiens
aagggcagttctttataatacatgaaaagcctagggtttaataaccacttagtaaggtatgttatggatatcttattttagagtaagaatataaggcatagccatatttatgaaggtagtaatactctactaatcaatacttagaagtttttgttatgactaatctgaatgctttttagtttttccttaatctagttatgttggtaatttataagtcagttttcagattaggaaagaaggtatttgagggtgttccatttccactgaatagtaagatgatgcttacttagatttccacagctgtttgaaagctctgtatttggctataacgga

SEQ ID NO: 303 - DNA, 135 bp, homo sapiens
tggcagtggttctggtactaaaaattgtggttgttttttctgtttacgtaacctgcttagtattgacactctctaccaagagggtcttcctaagaagagtgctgtcattatttcctcttatcaacaacttgtgac

SEQ ID NO: 304 - DNA, 192 bp, homo sapiens
aggtgaaggtgccgagctataaacctccagaatattattagtctgcatggttaaaagtagtcatggataactacattacctgttcttgcctaataagtttcttttaatccaatccactaacactttagttatattcactggttttacacagagaaatacaaaataaagatcacacatcaagactatctacaa

SEQ ID NO: 305 - DNA, 398 bp, homo sapiens
  misc_feature (335)..(336): n is a, c, g, or t
  misc_feature (338)..(338): n is a, c, g, or t
tccccgctagcttggggcgagcagagctgcatccagtggaactaaagccgttccaggattatcaaaaactgagcagcaaccttgggggacctggatcatcacggactcccccaactggaaggtccttctctggcctcaattcccgtctcaaggccacgccttccacctacagtggagtcttccgcacccagcgcgtcgacctttaccagcaggcctccccaccagatgccctgcgctggatacctaagccttgggagcggacagggccgccacctcgagaagggccctcccgacgggcagaggagcctgggtcccgaggggacaaggagcctggnntngcccccaccccgctgagggagttcctcttgccccctacccccggggcttgtatatagatt

SEQ ID NO: 306 - DNA, 283 bp, homo sapiens
gagtgaggcgatttcaatgtgtacatgagggcaacaatcgtgtataatatctacttggcacttcacagagggcatgactctttccataaaaatatttagtatgttcatgatgtcttttatctaaagaatttcatgctttagatattagtcaattctcaaaacactactctgaggaaggtgagtgacacacccctttatagacgaagaatttgcagttgaggctggttaaatgtgactaactcaagattaacactggtggtaggagacttgtctctggcctcat

SEQ ID NO: 307 - DNA, 390 bp, homo sapiens
gtggtcctgggtgtcatttggggagttttgccattacgagggttcttgggaatagcaggattctgcctgatcaatgcaggagtcctgtacctctacttcagcaattacctacagattgatgaggaagaatatggtggcacgtgggagctcacgaaggaagggtttatgacctcttttgccttgttcatggtcatttggatcatcttttacactgccatccattatgactgatggtgtacagctcccaagtgctccctatccagtccaaaggaccctcttgattacagcacaggaacttgatcgttggggaaccccagccccttggaacttggaagacccgtgtttcctggaccgcgaatcagtgtgttgggcatcagtgttttctgcaag

SEQ ID NO: 308 - DNA, 349 bp, homo sapiens
ggcctttgattggtataagccagaacattttttgcctactaaatagtttaaaatgtatcttgccccacatactttgtgctgcccttattactctatctttttctgccactaagtgtgccaagatcagtcatttgtctgcataaaagcatatgaaattgtaatgtattagcagtgatcccatactttatcacaagcttacgtgtaagaaagtaggccattgttttttaaagtcagtggtttgttagactataacctcctacatatttttttcttccttccttctgtccatctgtcataaatctttatgagcattcagatccaccataaatggtggtccatcttttttact

SEQ ID NO: 309 - DNA, 513 bp, homo sapiens
acgtccggcacgtaactgatcggagcattctgggaagaagtaatttattccttttcggcagccgaatgaaaaaaaaatttaaaaaaatgtgcgagctaatatggcaaaacaactggaaggacgctaaataataggattgctcataccagcgcgttatgaactcaccctagcttgtaacggaatctttttcactgagtgcagaatgtcggctgtttgtctgtatcgtcaggtgggataatccttacctgttcctcctccggagggcagattagaacatgatgattggagatgcatgaaacgtgattaacgtctctgcgtaatcaggacttgcaacaccctgattgctcctgtctgattctttctgacgatcacttacatttgtgttatgctgattagcagatatccacaaacatagctatgaagttctgactgggataaccttgctgtttgtctattttgcagtcttgctattgctgtttgtctattttgcagtcttgctaaatttgtttgttc

SEQ ID NO: 310 - DNA, 253 bp, homo sapiens
aatgagtggttcagccatcaccaccagtggccacctgttcaataaaattgcctagcaccacagtggagagtcatctacaccccaaggtgagctgtaagactggccaattctttgaagacctttttttctgttgggagaatggaaagcagaaagggaagccaggctctttaatgttccaagtcagctgtgcctcacacaaggctctctttttagctactaagtaacatactcaagactttgtatctgtgcagca

SEQ ID NO: 311 - DNA, 488 bp, homo sapiens
tcctacccagacgaggtccgtggggtttttgctgtgcggactggaaagtacaaggctcacttcttcacccagggctctgcccacagtgataccactgcagaccctgcctgccacgcctccagctctctgactgctcatgagcccccgctgctctatgacctgtccaaggaccctggtgagaactacaacctgctggggggtgtggccggggccaccccagaggtgctgcaagccctgaaacagcttcagctgctcaaggcccagttagacgcagctgtgaccttcggccccagccaggtggcccggggcgaggaccccgccctgcagatctgctgtcatcctggctgcaccccccgcccagcttgctgccattgcccagatccccatgcctgagggcccctcggctggcctgggcatgtgatggctcctcactgggagcctgtgggggaggctcaggtgtctggagggggtttgtgcctgataacgta

SEQ ID NO: 312 - DNA, 530 bp, homo sapiens
gtgcttgtcattccagagtgctgaggccagggctgatggtcttaaatgctcattttctggtttggcatggtgagtgttggggttgacatttagaactttaagtctcacccattatctggaatattgtgattctgtttattcttccagaatgctgaactccttgttagcccttcagattgttaggagtggttctcatttggtctgccagaatactgggttcttagttgacaacctagaatgtcagatttctggttgatttgtaacacagtcattctaggatgtggagctactgatgaaatctgctagaaagttagggggttcttattttgcattccagaatcttgactttctgattggtgattcaaagtgttgtgttccctggctgatgatccagaacagtggctcgtatcccaaatctgtcagcatctggctgtctagaatgtggatttgattcattttcctgttcagtgagatatcatagagacggagatcctaaggtccaacaagaatgcattccctgaatctgtgcc

SEQ ID NO: 313 - DNA, 529 bp, homo sapiens
cctcccttcctggagggatggccagggaaggagaaaacagagaactgacacctttgaaaccacagaatgtgttacatgcagactcgctcaagggcataagttattgtgaacgtttttgccaatcactgctcaacagccctgctagattttgtatgatgctgaattattatgcagactaattccacccagttgagacacaccatgcttgttcacttgtatttattgaaactgtggattcttgcccgtgctgtcccttgtatttactttaagcactgatcacttatcattcattcggtatggttttccctgtcccttgtacacattctggtatgaatttgtaaaaataacctgctacaaattggttgaatgtttctgtctgtggtgcgaaccagcattaacggatggggcacgtgcccaactgaggaacaggagaagaaatcaccaatttgggctctcagagctaagacacacttattgattctgttgcacattttgcactggtttatggcgattgttttcttggacggat

SEQ ID NO: 314 - DNA, 540 bp, homo sapiens
cgatctccagcccaagatgattccagcagtggtcttgctcttactccttttggttgaacaagcagcggccctgggagagcctcagctctgctatatcctggatgccatcctgtttctgtatggaattgtcctcaccctcctctactgtcgactgaagatccaagtgcgaaaggcagctataaccagctatgagaaatcagatggtgtttacacgggcctgagcaccaggaaccaggagacttacgagactctgaagcatgagaaaccaccacagtagctttagaatagatgcggtcatattcttctttggcttctggttcttccagccctcatggttggcatcacatatgcctgcatgccattaacaccagctggccctacccctataatgatcctgtgtcctaaattaatatacaccagtggttcctcctccctgttaaagactaatgctcagatgctgtttacggatatttatattctagtctcactctcttgtcccacccttcttctcttccccattcccaactccagctaaaatat

SEQ ID NO: 315 - DNA, 569 bp, homo sapiens
tgagcgggaagcttgcacttcggtatgcagggaggcagacagaagcattaaaatgcgtggctcaggctagcaagaacagatcactggcagattttgaaaaggctctgacagattaccgggcagagctccgggatgacccaatcatcagcacacacttggccaagttgtatgataacttactagaacagaatctgatccgagtcattgagcctttttccagagtacagattgaacacatatctagtctcatcaaactctccaaggccgacgtggaaaggaaattatcacagatgattcttgacaagaaatttcatgggattttggaccagggggagggtgtcctgattattttcgatgaacccccagtagataaaacttacgaagctgctctggaaacaattcagaacatgagcaaagtagtggattccctctacaacaaagccaagaaactgacatagagttggatctgtagcggtcctttggagagtgtgtgtggcgggagagtgaaaccttgggggaaaatgctaggagattcttttttctttttgttctacttttcgctcggaaag

SEQ ID NO: 316 - DNA, 342 bp, homo sapiens
  misc_feature (44)..(44): n is a, c, g, or t
  misc_feature (258)..(258): n is a, c, g, or t
ttaagcacttggttcctcagttggataacattagatccaaagtncattggttcagtggtgtgaagaaaggaagcacaattggcaggttatcactttccagtcgttccaatagatgatggttaacatgaattttacatgtgcaatgttcctgactgcaatgaagaaaaggccttctggagatttctgttttttaagcacattctccttccatccacatatttacatccttgtaatggccagttaagctagggcttgctntaagttggaagaacactgggttgacagagatctactgtgagctgtattgggactgctttgagaaccatctttcaatgcactgaa

SEQ ID NO: 317 - DNA, 407 bp, homo sapiens
ggattcaggatcagtgtaatgttactgatcttcaatagtaaccacaaacttaaaaaatctttacatattgccgtatgtattagatattctgatatttaatagctgagacagtcataccttatagtattattatcccaattttactagtgaggaaacaagcagttaataactgttagagctcagattcacattctgaaagttatagaaattaagaacatagagcctatgttcttaatttcaccaaaatatctcctcccaaattatacataccctttcaaacctaccttcctctcttagtaattaatgataccgtctttcaatttacatgaatcagtatcactattagtaaatgtattttatgccattatataacagactaatttatttattctgtactctactgtgat

SEQ ID NO: 318 - DNA, 105 bp, homo sapiens
gcgtaacaatattggtcttccaggtgttactcatttcaattatgtgtagtataccaggacagacctattttcatgtcttatttctttaaagagctgcttcattgg

SEQ ID NO: 319 - DNA, 382 bp, homo sapiens
aaatcactctcagtgcttcttactattaagcagtaaaaactgttctctattagacttagaaataaatgtacctgatgtacctgatgctatgtcaggcttcatactccacgctcccccagcgtatctatatggaattgcttaccaaaggctagtgcgatgtttcaggaggctggaggaaggggggttgcagtggagagggacagcccactgagaagtcaaacatttcaaagtttggattgcatcaagtggcatgtgctgtgaccatttataatgttagaaattttacaataggtgcttattctcaaagcaggaattggtggcagattttacaaaagatgtatccttccaatttggaatcttctctttgacaattcctagataa

SEQ ID NO: 320 - DNA, 363 bp, homo sapiens
  misc_feature (169)..(169): n is a, c, g, or t
  misc_feature (172)..(172): n is a, c, g, or t
  misc_feature (325)..(327): n is a, c, g, or t
ttttttgcactgagtttcagcagagattaaacattttatataaatgactcttaaagctttacaccttgggaccagtgtaccttctcgtgcagaatacatttagatataaaaagacgttattaatacattgcacagttttcaaaatttaaaaacaaaaccgaacgctgcnctncggcagccgccgccggttgctgctacatgaacggtcccagccgaggcccagcgcccttccaacgtccgctgccccggcaggttccctcggggctctttgggctctaaattggctcaccgcagcctcttgcgcggggtctgctccaccgagccnnngccaggggcggcgcttggagagggacacggcgcggg

SEQ ID NO: 321 - DNA, 478 bp, homo sapiens
cgctggaagagctcgtggcgtgcgacaacgcggcgcagaagatgcagacggtgaccgccgcggtggaggagcttttggtggccgctcagcgccaggatcgcctcacagtgggggtgtacgagtcggccaagttgatgaatgtggacccagacagcgtggtcctctgcctcttggccattgacgaggaggaggaggatgacatcgccctgcaaatccacttcacgctcatccagtccttctgctgtgacaacgacatcaacatcgtgcgggtgtcgggcatgcagcgcctggcgcagctcctgggagagccggccgagacccagggcaccaccgaggcccgagacctgcattgtctcctggtcacgaaccctcacacggacgcctggaagagccacggcttggtggaggtggccagctactgcgaagaaagccggggcaacaaccagtgggtcccctacatctctcttcaggaacgctg

SEQ ID NO: 322 - DNA, 293 bp, homo sapiens
tgaatcttcgggtgtttccctttagctaagcacagatctaccttggtgatttggaccctggttgctttgtgtctagttttctagacccttcatctcttacttgatagacttactaataaaatgtgaagactagaccaattgtcatgcttgacacaactgctgtggctggttggtgctttgtttatggtagtagtttttctgtaacacagaatataggataagaaataagaataaagtaccttgactttgttcacagcatgtagggtgatgagcactcacaattgttgactaaa

SEQ ID NO: 323 - DNA, 463 bp, homo sapiens
aaagcatcctgcagcgtgagcagctcctccacctggagctccgaagcatcttctcaggccaaagcggcattacccgtgaatctgtcttctccgccacagcatggtttgaggcgcagtctgttaatatagctgggccatgtcagtgactgttgtgtttgtggggtcaggtggggggcatggtatttgcaaaaaaaacaaattatggctaatttattattttgttgcagtggggttaactgtaaactcatgtaagagtctgtgatttcctcattggttgatctctctctctgtaatcctcattgcaaattttcaccaggacagcgttttttgattagaggggagctctggcacagtatgctttaatttagcaggaacttccagatgatttaaattctcgatgctgtgatgacacacatatgatctttcgtgtttctgagcgactctactttcattgtttgccagc

SEQ ID NO: 324 - DNA, 459 bp, homo sapiens
  misc_feature (45)..(45): n is a, c, g, or t
  misc_feature (360)..(360): n is a, c, g, or t
  misc_feature (402)..(402): n is a, c, g, or t
agccctgattctaccacttaaggtgatgtatgatcttaggctggncacttctctccctcatccgttttcctcttcaacataatgaaatagacttgaaagtctctaaggctctatcagttctgacattctaggcttcatatacattaagttgagccatatgtaatcactgtgtttgtaggttagaaacagctgagtatcgtagtttcatatatggttccagctaatacatgcaatgtggctggtgaacacttctgaattcagaaactatcccagatctcagctagaaccatccactgttctgtttgtccagtttcaacttaagggatctccatgcggtccctggaagtacccattgaaacntgcgtatttgtgtatagcagaactctgaaataatattctganagcagttatctctgaggaattgggttataggtgattttccctttccgcatgataaat

SEQ ID NO: 325 - DNA, 482 bp, homo sapiens
gggtcaactgacatccattgtatatactagtttctttcatgctatttttattttgttttttgcatttttatcaaatgcagggcccctttctgatctcaccatttcaccatgcatcttggaattcagtaagtgcatatcctaacttgcccatattctaaatcatctggttggttttcagcctagaatttgatacgctttttagaaatatgcccagaatagaaaagctatgttggggcacatgtcctgcaaatatggccctagaaacaagtgatatggaatttacttggtgaataagttataaattcccacagaagaaaaatgtgaaagactgggtgctagacaagaaggaagcaggtaaagggatagttgctttgtcatccgtttttaattattttaactgacccttgacaatcttgtcagcaatataggactgttgaacaatcccggtgtgtcaggacccccaaatgtcacttctgcataaa

SEQ ID NO: 326 - DNA, 432 bp, homo sapiens
gaacgcggagagcacgccatgaaggcctcgggcacgctacgagagtacaaggtagtgggtcgctgcctgcccacccccaaatgccacacgccgcccctctaccgcatgcgaatctttgcgcctaatcatgtcgtcgccaagtcccgcttctggtactttgtatctcagttaaagaagatgaagaagtcttcaggggagattgtctactgtgggcaggtgtttgagaagtcccccctgcgggtgaagaacttcgggatctggctgcgctatgactcccggagcggcacccacaacatgtaccgggaataccgggacctgaccaccgcaggcgctgtcacccagtgctaccgagacatgggtgcccggcaccgcgcccgagcccactccattcagatcatgaaggtggaggagatcgcggccagcaagtgccgc

SEQ ID NO: 327 - DNA, 266 bp, homo sapiens
aactcccaaatctggttgatgcctttgacagtgatgaaaacgatttcaccacatctgaatccagagaaaccggctttttttcttattgcgagcatgttaaaacgttgggaacatgtggggaattgtatattgcgctgaattaacttctcccgcctcttgtaatgctctggtgggttcttgtttgggaatgcgatattttgtggctggtttagctagagagtgaactctcaaaggtatcaaaactgtgcttccattattagtgcaag

SEQ ID NO: 328 - DNA, 518 bp, homo sapiens
aatggatagccgaagcaagcttttaattctaataggtaatgttcttcttttgtcttattgaaacaatgagaatactctgtgcatttcaaatgcactccgattatgctgtggttttattcacataagcacaatatgtgttttatttataacttcataacaaacttataatataataatttaccttagcagacatgcaaaagcttattcttgtgtgacttactttctttaagctaataatataaaaataaatatgtatcttaaaaatctataataaaacattagaaattaaagatatgtgctttttattttgcagatgagttcatttgcttctgtagatgtgttttcagagctaggtacagaggaatgtttgctacctttagcggtgaaaaaagaaagagagtcaagaattttgttggattgtgtttgtgtgtgcatatatttgatatcatcattatatttgtaatctttggacttgtaatcatagcctgtttattctactgtgccattaaatatacttt

SEQ ID NO: 329 - DNA, 459 bp, homo sapiens
  misc_feature (164)..(164): n is a, c, g, or t
ggaaacgttcccagttcattttcagtcctgttgtgagcacagttctgaagggtttattattgtcaaaataagttttgttttgttttgtttatgttgggtttttaatgttgtctcttgacccttaatgctcaggttcttgtgggagttaatcagccacatccaangttaccttgagggggaagaagagggtgatgctcagaagctaaacaagacaggggccacatgaccctctattgattagccccaagtagaaagtcctgtggttttatgtttaatggtaatagttgatcatatatggcataattttctatcagcttcctactcagtcactataaacacagacttgaaatagtactttaaatgtccaaatacctaaatgtgctaaactggaggtaactatttctaggtagttgaatttttgaaagtcatgatcagccacacaactgttttgtacatact

SEQ ID NO: 330 - DNA, 457 bp, homo sapiens
  misc_feature (69)..(69): n is a, c, g, or t
  misc_feature (72)..(72): n is a, c, g, or t
  misc_feature (123)..(123): n is a, c, g, or t
  misc_feature (237)..(237): n is a, c, g, or t
  misc_feature (239)..(245): n is a, c, g, or t
gtcaatgtatacactttctgttgcgtagttttcctgctgaaaaccttgttctgactcctcgcgccccgnttntttaaagtcttcacccgcgatgtggattcttgcccagggcgcctcccagcntccccctcctcagccccgggaagcgccgcgccgcagccccagtcccggggaggccgagtcctctgccaggtcctgggatcctgcagaccccatcctggtcctaaggcgccgtcncnnnnnnnccgccccgcaccttcctcctcatgccggggcctgctgctccccaggtctcccctccgcagtcaccgctttcattgaacctgcactggggaggtcccaggggcctgtcctgcggcacggggtcttcttgcctgcggagctccagggcgtggaaaatgcgctcctccgggatgcaggcgtcttactccaaaccgtgttgcgattgtgtgggcca

SEQ ID NO: 331 - DNA, 167 bp, homo sapiens
gcgaggacgaggcttaaaaacttctcagatcaatcgtgcatccttagtgaacttctgttgtcctcaagcatggtctttctacttgtaaactatggtgctcagttttgcctctgttagaaattcacactgttgatgtaatgatgtggaactcctctaaaaattacagt

SEQ ID NO: 332 - DNA, 383 bp, homo sapiens
aatgcctggttctgaagggtcacggggctgtcaacaggtgttccttactcataattgattattcaaacctttaagttagctttccataattcactgcacttaaataagtttaaatcaaatacagttattttagttacaggttaggaagatggtctttaaataaccaaaaatatgtttattttttattatagtgtagacatacccttcatctattatatcataatacatgttacattggactgaattagattttcccatttctaatagttggcaccattataagctataaggttcagaatcagaattttagtaacaactcaagagaaagttgttgaatataatccttagtgaaaacagtgtcctctaaccaatgcctatacaac

SEQ ID NO: 333 - DNA, 500 bp, homo sapiens
tgacctagctctcatgtctcaaggctcatctgttttgaatttctcctatcccatctgtgaggcggctctgcccaagttttctttctgtggaagaaggaaaggagagcagatttactatgctgggcctgtcaataatcctgaatttactattcctcagggagaataccaggttttgctggaactgtacactgaaaaacggtccaccgtggcctgtgccaatgctactatcatgtgctcctgactgtggcctgtagcaaaaatcacagccagctgcatctcgtgggacctccaagctcctctgactgaacctacgtgggaggagaagcagtctgatgacagagagaggctctacaaagaagcgcccccaaagagtgcagctgctaattttagtcccaggaccagacatccccagactccacagatgtaatgaagtccccgaatgtatctgtttctaaggagcctcttggcagtccttaagcagtcttgagggtccatccttt

SEQ ID NO: 334 - DNA, 83 bp, homo sapiens
acacacactcacacctattagatccgtttccattgaagaatattacgctcggggacaagccaggtgcacgaccaaaaatttaa

SEQ ID NO: 335 - DNA, 145 bp, homo sapiens
ttcctgaacatgagtttgcgacgggaccagtgtgtcttgatgatgagaatgagtttcctcctataatcttgtgccgtggaaatcagaagggcaaaacgaagcagtcatgatgagaagcacacctcagaaatcaggacatcccccc

SEQ ID NO: 336 - DNA, 410 bp, homo sapiens
attcttttttctcatactcttcaaaaagcagttctgcagctggttaattcatgtaactgtgagagcaaatgaataattcctgctattctgaaattgcctacatgtttcaataccagttatatggagtgcttgaatttaataagcagtttttacggagtttacagtacagaaataggctttaattttcaagtgaattttttgccaaacttagtaactctgttaaatatttggaggatttaaagaacatcccagtttgaattcatttcaaactttttaaatttttttgtactatgtttggttttattttccttctgttaatcttttgtattcacttatgctctcgtacattgagtacttttattccaaaactagtgggttttctctactggaaattttcaataaacctgtca

SEQ ID NO: 337 - DNA, 565 bp, homo sapiens
gtttctcttggcagcatcagctgggctgctttctttgtgtgtggccccaggtgtcaaaatgacaccagctgtctgtactagacaaggttaccaagtgcggaattggttaatactaacagagagatttgctccattctctttggaataacaggacatgctgtatagatacaggcagtaggtttgctctgtacccatgtgtacagcctacccatgcagggactgggattcgaggacttccaggcgcatagggtagaaccaaatgatagggtaggagcatgtgttctttagggccttgtaaggctgtttccttttgcatctggaactgactatataattgtcttcaatgaagactaattcaattttgcatatagaggagccaaagagagatttcagctctgtatttgtggtatcagtttggaaaaaaaatctgatactccatttgattattgtaaatatttgatcttgaatcacttgacagtgtttgtttgaattgtgtttgttttttcctttgatgggcttaaaagaaattatccaaagggagaaagagcagtatgccacttcttaa

SEQ ID NO: 338 - DNA, 336 bp, homo sapiens
  misc_feature (273)..(273): n is a, c, g, or t
gtagatgaagtcctgcattttaattgggattgattcacttagaactaaggatcaaagtttaaacttattgcagcgttaggggccatctttgttgctagttgaacaagtcttggtcgtttttaacatggctccttagggtattttctgaagttctgtctacttcattggaaagtgtttgcactacgcaggagtgacagcaatatgaaatgctttgtattcaaggcagcagaggtaatctggacagacagtacatgtgctttaaaagcaagatanagtcatagaaaatatgtagataatttagccgggcatggtggctcgcgcctctaatttgggagg

SEQ ID NO: 339 - DNA, 519 bp, homo sapiens
gacatagcacgaatctgttaccagtaggaggaggatgagccacagaaattgcataattttctaatttcaagtcttcctgatacatgactgaatagtgtggttcagtgagctgcactgacctctacattttgtatgatatgtaaaacagattttttgtagagcttacttttattattaaatgtattgaggtattatatttaaaaaaaactatgttcagaacttcatctgccactggttatttttttctaaggagtaacttgcaagttttcagtacaaatctgtgctacactggataaaaatctaatttatgaattttacttgcaccttatagttcatagcaattaactgatttgtagtgattcattgtttgttttatataccaatgacttccatattttaaaagagaaaaacaactttatgttgcaggaaaccctttttgtaagtctttattatttactttgcattttgtttcactctttccagataagcagagttgctcttcaccagtgtttttcttca

SEQ ID NO: 340 - DNA, 447 bp, homo sapiens
  misc_feature (48)..(48): n is a, c, g, or t
  misc_feature (58)..(58): n is a, c, g, or t
ggtgagctctgattgcttcagttggtcatcaactattttcccttgacntgctgtcctngggatggcctgctatcttgatgatagattgtgaatatcaggaggcagggatcactgtggaccatcttagcagttgacctaacacatcttcttttcaatatctaagaacttttgccactgtgactaatggtcctaatattaagctgttgtttatatttatcatatatctatggctacatggttatattatgctgtggttgcgttcggttttatttacagttgcttttacaaatatttgctgtaacatttgacttctaaggtttagatgccatttaagaactgagatggatagcttttaaagcatcttttacttcttaccattttttaaaagtatgcagctaaattcgaagcttttggtctatattgttaattgccattgctgtaaatctt

SEQ ID NO: 341 - DNA, 520 bp, homo sapiens
tgggacctacgcacaggacgttgtatcatgttcttagaaggccacctgaaagaaatctatggaataaatttctcccccaatggctatcacattgcaaccggcagtggtgacaacacctgcaaagtgtgggacctccgacagcggcgttgcgtctacaccatccctgctcatcagaacttagtgactggtgtcaagtttgagcctatccatgggaacttcttgcttactggtgcctatgataacacagccaagatctggacgcacccaggctggtccccgctgaagactctggctggccacgaaggcaaagtgatgggcctagatatttcttccgatgggcagctcatagccacttgctcatatgacaggaccttcaagctgtggatggctgaatagatgacaatgggaaaaggacttgaacctcaagctctctctaaggagctgttttcctcaaacgagaagaattgaagtgtttagttctatcatgttttctgccaattaccatgcatagaccctcagt

SEQ ID NO: 342 - DNA, 494 bp, homo sapiens
taaaggtaagcgccctcatacatgactgaaactttgtgagaggtcttatatttgaatggacccttaatgatttatgtgaaatagaatgaagtcctgtctctgtgagagaacgtgcctcctcactcatttgtctctgtctgttttcatagccatcaatatagtaacatatttactatattcttgaatacccttgaagaaagaaatccgttttctattgtgcattgctatacgaagtgaagccagtaaactagatactgtaaatctagatattgtacctagacaaaatatcattggttctatctctttttgtatctgttgtgccagggaaggtttataatcccttctcagtatacactcactagtgcacgtctgaaatagtatcccacgggagatgctgctccacgtctgaggtcacctgccctgtgtggggcacaccaccgtcagcaccaccgtttttacagttactttggagctgctagactggttttctgtgt

SEQ ID NO: 343 - DNA, 349 bp, homo sapiens
tgtatttgcctttgaacccttcaaactaaactttagccttttggctggtgttgaatgtctttagctggggtgacctggagtgacctgggacggtgttgtggtttaccgtctccagcttcagcctttccagaaacccttgtggagggcagtgttggctgcaggtttcatcatattgcagtttgaggtcaccactatttggggaacaagcttgcgtcctgctgaggggcaggattttcagcagagcgtcggtggggctgggccgtcgtggaggtggccccaggagtcatatggccatactcagacacaccttgtgtggcctgctcagagctggatgccacctttaggcaat

SEQ ID NO: 344 - DNA, 537 bp, homo sapiens
  misc_feature (205)..(205): n is a, c, g, or t
  misc_feature (223)..(223): n is a, c, g, or t
gaaacccagatgtcaccaaatggacattaatagttgcattaaggatcagtagcattaacaaaagttgctttaaaagccattatgtaaatcaagacttgaaaatgagtgagggaattttagcgacactgtctgagcagcagtgggagccatcttcgtttcgcctttgaactcccagtgggatgccctaccctgcgcccttaggacncggactgaccgtgtacanaactttacgtgccaaaattctcagtgaatttagctttctccctctttttgatgctgtaatttttgttcatcatgttttgctgtgatgttacataggtagatttgtatgtagttttaatgtcacctataacaaaatgtgtttggtagcagattgtccagaaagcattttaaatgaagaggtataaacccttaagggccaaaattctgtatattagattactcttaaacgaaaaaccagctgccgcttttatgtacacatattacatacgagtaggcagcagactttaaaaatttcagtgccattgtagttgacat

SEQ ID NO: 345 - DNA, 475 bp, homo sapiens
tcagtgtaatccttgactttgctcctcaccatcagggcaaacttgccttcttccctcctaagctccagtaaataaacagaacagctttcaccaaagtgggtagtatagtcctcaaatatcggataaatatatgcgtttttgtaccccagaaaaacttttcctccctcttcatcaacatagtaaaataagtcaaacaaaatgagaacaccaaattttgggggaataaatttttatttaacactgcaaaggaaagagagagaaaacaagcaaagataggtaggacagaaaggaagacagccagatccagtgattgacttggcatgaaaatgagaaaatgcagacagacctcaacattcaacattcaacaacatccatacagcactgctggaggaagaggaagatttgtgcagaccaagagcaccacagactacaactgcccagcttcatctaaatacttgttaacctctttggtcat

SEQ ID NO: 346 - DNA, 525 bp, homo sapiens
gcagttccttagtttacatatgtttgtgcaattattttctgtacttttttgttcattaattttgtcagtattacaccaaactgtttttgcaacaaaaaaattttttttgcattcatttaattttaggtcaaataacattttatttatgtggctcattttatatttcctaattttatttatttcatactgtagtgtacagtattatagttcttcaatatatagatatattttagtaaaaaaggaacatgacgttgatcatttgggcaaattttacgtaaagagaagagcatttattgtgttttggaacattaattgtgagatgggatttttcaattttattattttatttttgtttttttccaattactggaaattccaaatttgggaacttttgatacgatcttgtgaaaacactgtattttcgactgaaaattccactttcttcatcttgttttttagctaaaaagagggactgttaaatacaatgtatgataccatgacaaaaatctttcctgaattgtcttt

SEQ ID NO: 347 - DNA, 440 bp, homo sapiens
ggaactggcacaaaccaaactgcagttggtggaggccaagtgtaaaattcaggaacttgaacatcagagaggagcccttatgaatgaaatccaagctgcgaaaaactcttggtttagcaaaaccctgaactctatcaaaacggccacgggcacccagccattgcagccagcaccagtcacccagccacccaaggagagcacatagttccagccttacccaagcacaagagcacaatgttcaaaccaatggaaatctgggaggattcttcctggtgtccctttgaaggaaagtcaaggaggccagaaaacaagccagaatttttcagtagctctcactctttcttgtatgacacttttcaaagggatgctatttaaactgacctgttctatgttgaatacctattttccagcttctggaaggccatgttcagatccatcat

SEQ ID NO: 348 - DNA, 527 bp, homo sapiens
tacctcccttaagtatctccataaatgctcttccaagaaatcctccaaaaggcacttagctccatacttatgcattgaattgtttcaccttagcaatcagtttttaagactccaaggtaacaagaaagaaaagatctgattcttttactaaaagctagtgaataggactgttttttttcaagaggcatcacttttacaagaactagctagaccaccattattcctttatcaagaaaaagtttcttttttaaaaaataaataaaactctggctatacatagtacaaagttcatacataatacatctggaaaaaaaccgaagagtataccctgaagcaaaaggtttattggagagagaaagcctcttccattataccaagtctgaagatggcagttttcaaagttcagagggtggcagtgatatataattaatgccaaactgtttgctcatgggtatggcaggatgcaatgaaggaccaaaaaaaaaaaaaaaaacaaaaaacaaatcattctgcacattacactgagc

SEQ ID NO: 349 - DNA, 221 bp, homo sapiens
agtggaggtaaaggtgtagctagcttgaaccagagtgcactgagccgtccaatgcaaaggaaactggtgacacttgtaaactgtcaactggtggaggaagaaggtcgtgtaagagccatgcgagcagctcgttcccttggagaaagaactgtaacagaactgatattacagcaccagaaccctcagcagttgtctgccaatctatgggccgctgtcagggc

SEQ ID NO: 350 - DNA, 320 bp, homo sapiens
gcctttgggaacagggtcagcatccacggcaatggtgccattccagacactgcatgtgtcagcctcatgactacaaaccagaccagatgggcttggctattgtcatgcccaagaagccacagctcagagaggtttggtgacctggccatgaggacagagctggtagtagagctgggcttcagacccaggcagcccagccctttccatgagctgagtctctgcctctgcctctcccttccaagctctgcccatgtgtgtggccagtcagatggtgaaggaacttaaaccacataaaaaggccagacagggcggggtgtggt

SEQ ID NO: 351 - DNA, 258 bp, homo sapiens
aagatttccctgtagcatttagtatcagaattgccaattatcatttgtcagtaggctccgaaatagactttgggcatgtttttaagtagtagtgatagattcttcaatacattcatattccctctcatcatgtaagagtaaatagaatcaaggatatgctactataggcccatacaagataacagagggatgctatgcgttttttgtagtaactgttcaggttgtgcccgtaagaaggtaaatgtacgggcagatcac

SEQ ID NO: 352 - DNA, 382 bp, homo sapiens
gtagaaacgtcagagttatggagcttgccaccacattgcagaaactgctacagcctcctcaacctggcagaagttcgcagcaaatacctgggaaagccaaggacattccaatccccaatcttcctcccttggattttccatctccagaacttcctcttatggagctcctgagaatattctgaaaggatttatgaataattaaaatggaaggccacagaaaggggaaagaggaaataatacagtaatgttaatccagcaaaaaaaatgaaaagggaaaaccacatagaagggtaatcccggaaatgcttcatctggtggactgtgggagcagaggcattgccaggacttgggaaacagtcactgtgaaatgcgctgcgtatct

SEQ ID NO: 353 - DNA, 482 bp, homo sapiens
  misc_feature (27)..(27): n is a, c, g, or t
  misc_feature (74)..(74): n is a, c, g, or t
  misc_feature (76)..(76): n is a, c, g, or t
gtggtccatcaattcagacactctgcnttggatgccttacccttttcattagtgcattctttgcttctgaaacntngcagaaactcgttagccagtccactgcctttctgacaatgtgtggagtcacgtatgcttggtatatgcctttactacttttaaagttctacagtttattacttgcccaagtgttactaaatccttttcttatgtgtactggatggagaaaaaattatagccagcactttgagaggaaagttttcagaaacaatattaactggcactactaactgaaggccacaggagatgctatcaatgttatttgtaatctgaagattgaacaaggctgtgaggctcatttcaaactattttgaggtgttaaaatatatatatgctgtttctcagctgttccactcaaaccgtgttaggactctcaaaggtaaaatgtcacaggggcttttcagttgttacagagctcagcagct

SEQ ID NO: 354 - DNA, 427 bp, homo sapiens
actgttccagtagtttatcctgatggaaccgaacaatattttgggagtccaagtgacatggcttctactgcagaaaacatcagagacaggatgaaactagttaatctcaaaaggcagcagctgagacatcctgaaatggtgaccacagagagctaatagctaccagctacctacagatttgcagttcataatcccgcatgttgtcaacatactacagcattagccaccacaccttaagatgcatttcacagccaaaataagtctcatttcttttcatgacacatttctctttacatgttaacaccttgctactaccaaggcataattacttaacatgcttcgaggctgtagattccaagtatcttaaaagaaggaactataaacattgcactgaaaacttgctttaaagctttacctgacctgtcag

SEQ ID NO: 355 - DNA, 421 bp, homo sapiens
  misc_feature (326)..(326): n is a, c, g, or t
ggaaacacacctttatatcccagttagtactgacaaaaattaaactagggactggccaaaaacagtgcctttcctcactttaatctcactaaagtagataagactcaagttattttgttcttgcaatggcattgacaaatgtttgcaccaaaaaccatgttgaagttcattaaggaaactgtgatccaagatccaaggtcaaaaaaacaaattcatcaattcagcacaccaccaactcacaggctaagcatcttactgctaattcattgatgctgccatttgtcaagtgccaaattgaattattgatttgtcaataatttccttcngttggttacttatatagtatattgcaattcttgttgctgaagtcagctacactttttctatttgaaaaacaatttcttgcatttgggatttcagg

SEQ ID NO: 356 - DNA, 465 bp, homo sapiens
  misc_feature (336)..(336): n is a, c, g, or t
ctgtcgttccggttatgttgtgtaagtcaactcttcagcctcattcactgtcctggcttttatttaaagaaaaaaaaggcagtattccctttttaaatgagctttcaggaagttgctgagaaatggggtggaatagggaactgtaatggccactgaagcacgtgagagaccctcgcaaaatgatgtgaaaggaccagtttcttgaagtccagtgtttccacggctggatacctgtgtgtctccataaaagtcctgtcaccaaggacgttaaaggcattttattccagcgtcttctagagagcttagtgtatacagatgagggtgtccgctgctgcntttccttcggaatccagtgcttccacagagattagcctgtagcttatatttgacattcttcactgtctgttgtttacctaccgtagctttttaccgttcacttccccttccaactatgtccagatgtgc

SEQ ID NO: 357 - DNA, 505 bp, homo sapiens
cctctgagtgttttgtgggttctgggtgttttgtacattttagccaagctaaccacttgtctgcaagtactgactttcctatgaattctttgaagattattgagtcagaaaggaaaaatatagccccaaattcccaggcttttaatgcattacattaactgcctattgaaatgagaagttcttcacaaacttgtatacccactaacaagattgcacataaacatgcattaaagtatatactaagaaaccctctgtccaacggctcatgcatatgaagtccgaacatgggagtttgccaattgcattcatcaagtcgttttgcggagtcagatccctgatggaagagctcacaggctctgccttccaagtcctgggttcctaactggtgaccttagcctggggtctgtggggagaccaaccctggcttccaagaaaaccacattccatggactatcagaaatagacacagatttgggtgacaaagctggctctgtatttgcatttt

SEQ ID NO: 358 - DNA, 511 bp, homo sapiens
ttcttgcatccttctgtgattcaaaaaagtaaaatgtggctttctgaaatgatggataagagtctacatcttctagaaaaaatacataaaggagtagttaagctctgtaaatgtgccacgagctccaacacgaccatcgtagggtgaagcccacgttttcttccatggcctcaaaggccctagaacttgcctacctttctggccttacctcctagctacttatccatctcttgaactttatactcttgtataaatttctaactttcagaaaatgccatactctgttttggcaccacacatgtatatttccccctggtacacttggaagactcttatccatctgtgaaaccctatgttgtcatcacttggtccatgaaatattacctggccaatatcccaccatcacctcaaacccaatcaccccctcctctgtatgctgtcacacctatattattaaacttatcacattgcattgtaattacttcctgacctttgtatctactcttttagt

SEQ ID NO: 359 - DNA, 538 bp, homo sapiens
aaacccctcatgtaattcagtgttagacccaagagacttgagacagctccatcagatgtcctcttccagtatgtcagcaggcgccaattccaatactactgtttttgtttcacaatcagatgcatttgagggatctgacttcagttgtgcagataacagcatgataaatgagtcgggaccatcaaacagtactaatccaaacagtcatggttttgttcaagatagtcagtattcaggtattggcagtatgcaaaatgagcaattgagtgactcctttccatatgaattttttcaagtataacttgcaagatttaaatccttttaaatcttgataccacctatatagatgcagcattttgtatttgtctaactggggatataatactatatttatactgtatatataatactgactgagaatataatactgtatttgagaatataaaaaacttttttcagggaagaagcatacaactttggacatagcgaatacaaaattggaagctgtcataaaaagacaactcagaggccaggcgca

SEQ ID NO: 360 - DNA, 543 bp, homo sapiens
gaatgtatttgctgacaaccattaaagtcagaagttttactccaggttattgcaataaagtataatgtttattaaatgcttcatttgtatgtcaaagctttgactctataagcaaattgcttttttccaaaacaaaaagatgtctcaggtttgttttgtgaattttctaaaagctttcatgtcccagaacttagcctttacctgtgaagtgttactacagccttaatattttcctagtagatctatattagatcaaatagttgcatagcagtatatgttaatttgtgtgtttttagctgtgacacaactgtgtgattaaaaggtatactttagtagacatttataactcaaggataccttcttatttaatcttttcttatttttgtactttatcatgaatgcttttagtgtgtgcataatagctacagtgcatagttgtagacaaagtacattctggggaaacaacatttatatgtagcctttactgtttgatataccaaattaaaaaaaaattgtatctcattacttatactgggacaccat

SEQ ID NO: 361 - DNA, 388 bp, homo sapiens
ttaagggctttatgtgaactatgatattgtaatttttctaagcatattcaaaagggtgacaaaattacgtttatgtactaaatctaatcaggaaagtaaggcaggaaaagttgatggtattcattaggttttaactgaatggagcagttccttatataataacaattgtatagtagggataaaacactaacaatgtgtattcattttaaattgttctgtatttttaaattgccaagaaaaacaactttgtaaatttggagatattttccaacagcttttcgtcttcagtgtcttaatgtggaagttaacccttaccaaaaaaggaagttggcaaaaacagccttctagcacacttttttaaatgaataatggtagcctaaacttaata

SEQ ID NO: 362 - DNA, 207 bp, homo sapiens
atttgcagcatgcttgactttaccaattctgatgacatctttacggacactattatcactaagaccttgttatggcgaagtctttagtctttttcatgtattttcctcatgattttttctctttatgtagtttgactatgccttacctttgtaaatatttttgcttgtgttgtcgcaaaggggataatctgggaaagacaccaaatc

SEQ ID NO: 363 - DNA, 543 bp, homo sapiens
aaaatacctttctgcatgactctttccagaatgtggctgctgtctgtgatttgctcagcattgtctgcaaaaatcgtcggcacaactgccaccagagctcaaagcctgtcaacatgactgactgcagactcacttcaggaaagtatccccagtgccgctatagtgctgctgcccagtacaaattcttcattgttgcctgtgacccccctcagaagagcgatcccccctacaagttggttcctgtacacttagatagtattctctaaggcatccactgcatttcctttcatttgacatagcttctgttacaattgcatccacgttttcttttcttttgttgattttcttgttcccgtagaagaaagaagaaaggtgtttggagaattcgagtgcctaggatgccagaccagagttgagacaaaaagaaataagattattttctgctttgtagttctgtacttttcgagagaagggaatagggaagacagcaaagaaagattcagatttctaaccctgcaacttttgccaagctttattgccctg

SEQ ID NO: 364 - DNA, 552 bp, homo sapiens
  misc_feature (63)..(63): n is a, c, g, or t
  misc_feature (72)..(72): n is a, c, g, or t
  misc_feature (74)..(74): n is a, c, g, or t
  misc_feature (85)..(85): n is a, c, g, or t
  misc_feature (138)..(138): n is a, c, g, or t
tttcagcaccgatggccatgtaaataagatgatttaatgttgattttaatcctgtatataaantaaaaagtncncaatgagtttngggcatatttaatgatgattatggagccttagaggtctttaatcattggttcnggctgcttttatgtagtttaggctggaaatggtttcacttgctctttgactgtcagcaagactgaagatggcttttcctggacagctagaaaacacaaaatcttgtaggtcattgcacctatctcagccataggtgcagtttgcttctacatgatgctaaaggctgcgaatgggatcctgatggaactaaggactccaatgtcgaactcttctttgctgcattcctttttcttcacttacaagaaaggcctgaatggaggacttttctgtaaccaggaacattttttaggggtcaaagtgctaataattaactcaaccaggtctactttttaatggctttcataacactaactcataaggttaccgatcaatgcatttcatacggatatagacctagggctctggagggtgggg

SEQ ID NO: 365 - DNA, 477 bp, homo sapiens
  misc_feature (114)..(114): n is a, c, g, or t
  misc_feature (118)..(118): n is a, c, g, or t
  misc_feature (258)..(258): n is a, c, g, or t
ggtatattaccttcagtttccagatcaagaaactgaagtgcacagaagtttgaagtaacttactcaaaccacttcactaataaccagggtaggcaggactcaaatacagacagntttngcctccaaaatacatggtcctaatcacctccctatgttgtgtccatgcagtcacgagtttggcatgaggagagctggaggaagagcccaggagacagtgaagaggaagcaagaggctgtatatgtagccagctgggtttngggggcacctcatgagtatcccatagcacaaacgggcaaactctgttactggcacattaactaaaagacaaaactccacataaacctgagtccttccaaccaacccggagacttacccaaatctaatctaaataacaacaacaaaaaagaaaaaatcactatgagcctgtaagtcattaagggggtacatcttcaaatgacatgctatcactaaccatg

SEQ ID NO: 366 - DNA, 489 bp, homo sapiens
  misc_feature (54)..(54): n is a, c, g, or t
gagtgtgacctctattggaaacctttgttcaaattcaataattcagagatgctnacatacttctgcaagcttcctgattatgttcactgtaatattaatgacctaagtttgaatgtatttccttacagtccattaatttgacatccatcttttacctggggattattacaattgcaataagtcattaatgttttcttcacacagcttcttaaaccaagtttctctgcagctctttcggttctgcttacagtgtgtgggaaatctgatttttttcccctagtaatagtttgataagaaatttagtgtattgactgcctcagtgacacaatttatctttaaaggtgtggaagctggtggggaccaaatgttacctgtgtttttgctgttgattgctattttcagaagcaaaccatgtttttcacttacagtaggagtcaacaaatttgggattttagaagggggaggagggagctatttgtgtaagactgc

SEQ ID NO: 367 - DNA, 498 bp, homo sapiens
aactaattctgattgtgtcgtgcccaagtacccttttttttttaatgaatagggaccaatgccacattgctttttatatttctttcttttttaatgttgccaaaaccaaaagtagctttgttttcctttgtattttgctactttgcagtatttgtgtgtgtggttttttttccttaatttgaaagggacagcactgtgtatgtttataaactaaatgaagataagatattattttgtataaacattcatctgagaacaatcaaagcagtagccacatggtgctggctcctttgcagcacaaacctggtcattttgatgactgtacaacaggaagacttgaaaaatcacgtggattcatattaccaccgctctcatttcatggagtcttctgatcaaaaaagctcacgtcgtatttcttcttttcctttctcttttctagaaattgggtgtttgtaccagaatggaattttgcttctcggttatcctgtgcttcagatg

SEQ ID NO: 368 - DNA, 560 bp, homo sapiens
  misc_feature (283)..(283): n is a, c, g, or t
  misc_feature (328)..(328): n is a, c, g, or t
  misc_feature (344)..(346): n is a, c, g, or t
  misc_feature (349)..(350): n is a, c, g, or t
ttttttcccccttagcataagcatcttatatataacaactcatttgtacaaggtttttaagtttatatataaaatgtgtatatatatttttgtttcccctttttgacgtttttttttctgtatgaaacccagatgtcaccaaatggacattaatagttgcattaaggatcagtagcattaacaaaagttgctttaaaagccattatgtaaatcaagacttgaaaatgagtgagggaattttagcgacactgtctgagcagcagtgggagccatcttcgtttcncctttgaactcccagtgggatgccctaccctgcgcccttaggacncggactgaccgtgtannnaanntttacgtgccaaaattctgtatattagattactcttaaacgaaaaaccacgtgccgcttttatgtacacatattacatacgagtaggcagcagactttaaaaataaaaaaaacctaggcatgttgatgttgcaaaatgctgtataaagctgaaacctgttcattcagtgccattgtagttgacatgaagcgattgtaaaactgtctccga

SEQ ID NO: 369 - DNA, 475 bp, homo sapiens
cgcccggctgagtgtactagtagttaagagaataaactagatctagaatcagagctggattcaattcctgtccttcacatttactagctgtgcaaccttgggcacataacttaatgtctttgagccttagttttttcatctgtaaaacagggataataacagcaccccatagagttgtgacgaggattgagataatctaagtaaagcacagtccctaggacatagtaaatgattcatatatccgaactactgttataattattccttcttactctcctcttctagcatttcttccaattattacagtccttcaagattccatttcttaacagtctccaatcccatctattctctgcctttactatatgttgaccattccaaagttcttatctctagctcagacatctactacagcactgtgatgctttatgcaactaactgtttacatatctgtcccctgctactagattgtgag

SEQ ID NO: 370 - DNA, 196 bp, homo sapiens
ttcctaaaaatgcttcactgtacgtagttaagtcgtagctataacttcaaattttttaaaagggacaaactgtaaaaaatgtgtgtattcttaaaatgcaatatttgtaaggcttgttccaatgccacatacttgcagctcccattctatgtgtcatcaatagtgtcctatgcaataaattatttgcaggtcttta

SEQ ID NO: 371 - DNA, 435 bp, homo sapiens
gacatagcacgaatctgttaccagtaggaggaggatgagccacagaaattgcataattttctaatttcaagtcttcctgatacatgactgaatagtgtggttcagtgagctgcactgacctctacattttgtatgatatgtaaaacagattttttgtagagcttacttttattattaaatgtattgaggtattatatttaaaaaaaactatgttcagaacttcatctgccactggttatttttttctaaggagtaacttgcaagttttcagtacaaatctgtgctacactggataaaaatctaatttatgaattttacttgcaccttatagttcatagcaattaactgatttgtagtgattcattgtttgttttatataccaatgacttccatattttaaaagagaaaaacaactttatgttgcaggaaaccctt

SEQ ID NO: 372 - DNA, 187 bp, homo sapiens
ctggcttgtcttaacaatctagaaaggtttcaaatatattgatcatatttatttatgagggaatttccaggagctataattttagctagcagttcaaaccaaatttataaataagcaaatcttttcactgaatattcagtctgctaacagcttttgtatcattcctcctttgtctcagacttaaaaa

SEQ ID NO: 373 - DNA, 460 bp, homo sapiens
ggtgtcgaactatatgccttgtatgatcagttttatgtggctaatgagtttctcaaatatcgtttacacgttggtaactataatggcacagctggagatgcattacgtttcaacaaacattacaaccacgatctgaagtttttcaccactccagataaagacaatgatcgatatccttctgggaactgtgggctgtactacagttcaggctggtggtttgatgcatgtctttctgcaaacttaaatggcaaatattatcaccaaaaatacagaggtgtccgtaatgggattttctggggtacctggcctggtgtaagtgaggcacaccctggtggctacaagtcctccttcaaagaggctaagatgatgatcagacccaagcactttaagccataaatcactctgttcattcctccaggtattcgttatctaatagggcaattaattccttcagcacttt

SEQ ID NO: 374 - DNA, 275 bp, homo sapiens
acaaatcttacatgaaactctcataaaccatgaaaatgtagctggccttcgggccttaggcatgaaataagcatgaggaacatattcccctaacttctacccccagcccagcaagttatcctttaagaaatctcctaggaattctggagtttgaaaacaattgctctatgttattcctgcttccagtctctaagtaacaagggcatttaaaagcatagtctcttaaggtccactatagtggttctttatttaaggaataactcagctgggtgcag

SEQ ID NO: 375 - DNA, 376 bp, homo sapiens
  misc_feature (83)..(83): n is a, c, g, or t
  misc_feature (113)..(113): n is a, c, g, or t
  misc_feature (116)..(116): n is a, c, g, or t
gcttcctcctgttgtaatcactaaccccaactctgtctcccttgcccgattcattcattcgttaattaattcatccaacatcntgtccccaagaagctcagtctggggacatnctngatccagttaaatgcgagtgcttcctagttatacatggcgactgctgagaagggactccagagtccaggcacctacctcccaggggctcaccgttcactcctctagcctcatttagagctcgcattaagagcacgggatctggatccacactgtttggattcaaatcacaacttcaccacttagcagctgtgtgttctgggaaaatgacccaccttctctgtgcctccattttctcacctgtaaaacgggctcccaggct

SEQ ID NO: 376 - DNA, 462 bp, homo sapiens
gtcatgaggcagctttcatcacacccttttaacatttatctaaaagaatttaaattctttttcaaaaattacactacaagtttataagcccaaatggctctgtgaaatcagaagtgcaaaggtgtgcaaacttgtatctgaagacctaccagggacaagcaggtaagagctgatgtgagtgtgtgtgatgggatctgtaaggaactggaacacacatgtcctatccaaaggaatcagctgcagctgcttgttgtcaagtataaagtcaggacctggcttggctttaaccgtttttcaagaaaactggaaatctggattttcagcgaacatgcctgattttaaaaggttgactcaagtttttacaaaatactatgtgggacacctcaaatacatacctactgactgatgacaaacccaggagtttgtgtgtcttttataaaaagtttgccctggatgtcatat

SEQ ID NO: 377 - DNA, 417 bp, homo sapiens
  misc_feature (213)..(213): n is a, c, g, or t
ttccccttctttaaccagagggcatagaattggggcttagtgtgtcctaaacaagctaaaagattccacctgtagaatcataaaatgagagtctcacacagtttcatgctactttttgtctcttcagcaaggaacggttgctgggattgtcagtgaccaggcatgtctggatagcttcacacatacacataatgcccggttcacctcagcccnacacatgttctagaagtagccacttgccaagtgtcagtgttcagtctaaacagcaaatgggttaaccacatgaacagcactggcccatgtgagaatggtgtgaaggcctcctttgtaccattttccatttctctaactcacatgtgtagtctcagcactgcagaggacagatttgtttgtgccctctgagactggttggttggt

SEQ ID NO: 378 - DNA, 560 bp, homo sapiens
  misc_feature (262)..(262): n is a, c, g, or t
  misc_feature (274)..(274): n is a, c, g, or t
  misc_feature (307)..(307): n is a, c, g, or t
  misc_feature (474)..(474): n is a, c, g, or t
gacaaccattatgacttttgcctcataccttgaatcctaaaagttttcgctgaggttaatgtgaacactgctttacaagcttgtatttttgtgatttactttttctgtaagccttttggggtttacacttaccagtttctaatggaaattagaattctaattgaatattgttttgtctcagcctaaaagttacggtcagcatggcaattcacctattttaggaaaaatactcttttcataatatgaaatgcataaagcagtncaaaaagcagtntgtattccatcatcttcctttttcattccagtncttatttttgtaagtattacttttcctcctccggctacctggactcaaaatctcagttgtctttgacagtttttttcttgtccctgaccaaaaaagaatgatcatacccagaattcaatgtttgatattttaatgaatgtatgttctagtgtttttcagagtgagtntaccatctgtataaaaacaccttggggggcaggcaggggcatttaaaaatgtaggacctatcgtccagactcacagagtggggctc

SEQ ID NO: 379 - DNA, 544 bp, homo sapiens
  misc_feature (190)..(190): n is a, c, g, or t
ggtagtttctgaacctattgacattgttcaaaatggatcatgtgccatattttgttagttgacatctgagttttcagtaaaatgattatggaattaatcagcaaatgtagaagaatatattcaaagttaaaattcagtggcagcacagattatttttatcagagctgtaaagaaaacaactgtccttttnctccccaccacccctcctgccccactttggcccagaaaccaaatgtgaacttcctgtctcccacctcagcactagtccatgccaggacaccagctgacaatttcttggttttactgtcaataattgtaccatgtgatcaattactgtcctcacttagaacaaagcctgagtccgagaatatttatattttaccaatatatgcctgttacaagagaaggaaatatgagttatttaagtttaacttttttatgtgaattcagagtttatttatcgagggaaatatgtacaaagaagcttcaaatggaatatttaccgacattccttatacatgacagacacttggctacatgggaa

SEQ ID NO: 380 - DNA, 158 bp, homo sapiens
gttcacaaagagttttggtgcttctggaggatatattggaggcaagaaggagctgatagactacctgcgaacacattctcatagtgcagtgtatgccacgtcattgtcacctcctgtagtggagcagatcatcacctccatgaagtgcatcatggggc

SEQ ID NO: 381 - DNA, 551 bp, homo sapiens
gtgcagctttggttcatattcagtcatctcaggagaacttcagaagagcttgagtaggccaaatgttgaagttaagttttccaataatgtgacttcttaaaagttttattaaaggggaggggcaaatattggcaattagttggcagtggcctgttacggttgggattggtggggtgggtttaggtaattgtttagtttatgattgcagataaactcatgccagagaacttaaagtcttagaatggaaaaagtaaagaaatatcaacttccaagttggcaagtaactcccaatgatttagtttttttccccccagtttgaattgggaagctgggggaagttaaatatgagccactgggtgtaccagtgcattaatttgggcaaggaaagtgtcataatttgatactgtatctgttttccttcaaagtatagagcttttggggaaggaaagtattgaactgggggttggtctggcctactgggctgacattaactacaattatgggaaatgcaaaagttgtttggatatggtagtgtgtggttctcttttgga

SEQ ID NO: 382 - DNA, 485 bp, homo sapiens
ttattctcattatacctgcttcatatgggtatattactattaaaacagaataccatagagtaattgcattatttgaaaattctctcattttacaatgcacttcaccaatgaaacagctaatttccattttgaaaattaaaagaaaacagcacagagaagttaaatgcggtgtagcaaagttatggggtctgcttgagggcactaacctcaacagattattcctcctctccttagaataaccatgaaaatacaaatttacttagcacatttttgctttttaagtagctggttcattttctgaatttctcacattcagagttccagtcattattgttacatcatgtttgcagaaaccttgtcttatttagtgtctatttgcatataaccctgaaaacattattatttgaaaacttttctatatctcaaattaatatacattttcataacctacctttgtattaagacttgcaattttatcaatctat

SEQ ID NO: 383 - DNA, 570 bp, homo sapiens
gtcctcacaaggcggctatggcagaaacgcagaccacagcatgaactaccagtacagataagccccgcgcggagatttctaccttctgcacttactccccatcagaagatcgagttttatgcatcacagttaacatgtcagctgcctgcgctccaggcccccgcccccatcccgtccacgttgctgtgtcgtgaggtgcagcgggtcaccctgtggcccgtcctgtgacccatatttagccgtgtttgggactccgtgtcttcaatggtttgttagttgccattacaactttgtctgggtagagtttttgagtttttgcagttcagtatccctctgtctattcacacttcgtgttagtggtaactcagtttgtctttaaatagttacagaagggatacgtcatttgttaatgctttttgttgaagtgagttaaacgagcttttctgtattttaatgctttagtgtttcagttttataagtgaagattttattttaaaaaccagtgggaaagagtggggggtttctttttatgtctgggtcattcaggcagtacatctgaattaagctgaa

SEQ ID NO: 384 - DNA, 541 bp, homo sapiens
tgccgtgctcccaaaacattttaaatgaaagtattggcattcaaaaagacagcagacaaaatgaaagaaaatgagagcagaaagtaagcatttccagcctatctaatttctttagttttctatttgcctccagtgcagtccatttcctaatgtataccagcctactgtactatttaaaatgctcaatttcagcaccgatggccatgtaaataagatgatttaatgttgattttaatcctgtatataaaataaaaagtcacaatgagtttgggcatatttaatgatgattatggagccttagaggtctttaatcattggttcggctgcttttatgtagtttaggctggaaatggtttcacttgctctttgactgtcagcaagactgaagatggcttttcctggacagctagaaaacacaaaatcttgtaggtcattgcacctatctcagccataggtgcagtttgcttctacatgatgctaaaggctgcgaatgggatcctgatggaactaaggactccaatgtcgaactcttctttgctgc

SEQ ID NO: 385 - DNA, 251 bp, homo sapiens
cccatacaagtattcattttttctaccctttcctttgtaagttcctgggcaacctttttgatttcttccagaaggcaaaaagacattaccatgagtaataagggggctccaggactccctctaagtggaatagcctccctgtaactccagctctgctccgtatgccaagaggagactttaattctcttactgcttcttttcacttcagagcacacttatgggccaagcccagcttaatggctcatgacctg

SEQ ID NO: 386 - DNA, 465 bp, homo sapiens
aaaccccaatgctgacagccatatgcatttgaaaatctatctagattacagatgggcatttattactggcagtggaaacaccagatagaagatcttaggagaggcccagaaatgcatcaccttgtcatgacaaaagagaaggcagtagagtagggatagttacaaatgcatccatcttaattattttcaataggcttgtaaatcttatcgatggaaggagaaaggagacaagatgtggaagaattgacatgtatcccaccataaaatggtagaagatgagttttcaatgagtagtcatagttgaaattttacaaccaaagctcccatttgattgtaatcttgccaaaatataatggatgtataaatgaacttggggtataagcaataatatccactagtgttgttatcagctactgtaaccaagtggctggttcatttggttgatgctgattatggcctttaacc

SEQ ID NO: 387 - DNA, 461 bp, homo sapiens
  misc_feature (56)..(57): n is a, c, g, or t
  misc_feature (71)..(73): n is a, c, g, or t
ttcattatctcttcacctggtgatttcaaggaaaatgtgttgttgttctctattannatactgagttttannnacttaatttggttaattttagtattaaaaccatggaaatggtgaaaaccaagtgggatcattttggcagtaattttgagactctgtccgtctggataactgagaaagaaaaagaactcaatgccttggaaacttcgtcatctgccatggacatgcaaatcagccaaattaaggtgacctgctcacacattatatttataatccatgtctagcttttaagaactactttcttacatttcatcaaatgctgttcggtcccaggacaagactttcattgcaatgtgactattaaaattaaattcatacattttatcaagctaagaggtctggattaatactgggcaacatttatagttggaattatgtattcacattgtctgacttgtgca

SEQ ID NO: 388 - DNA, 332 bp, homo sapiens
  misc_feature (42)..(42): n is a, c, g, or t
  misc_feature (44)..(44): n is a, c, g, or t
  misc_feature (47)..(47): n is a, c, g, or t
  misc_feature (57)..(57): n is a, c, g, or t
  misc_feature (67)..(67): n is a, c, g, or t
  misc_feature (85)..(85): n is a, c, g, or t
  misc_feature (107)..(107): n is a, c, g, or t
ccacattctagttgaatccctgcaatgtaacttgacatttgnanaanttgattcatnccattttaangaaatatgatataggtgncagaatccaggatgaagaggtnccttgttgcttagatgatgacgttgtggattcatttcacatctctctctctttttaatgtagctcttctccctccttggtttttattcctccctccttctttcttcttcaagcctcctctaatgttaacatctttggcagtttggccagtgttgacaactactttttgattatttggtattttaaaatatttggtattttaaaatgcttttattggccaggcgtg

SEQ ID NO: 389 - DNA, 112 bp, homo sapiens
ttcgcgttcctcgttaagcagaagaagtcagtagttattctcccatgaacgttcttgtctgtgtacagtttttagaacattacaaaggatctgtttgcttagctgtcaacaa

SEQ ID NO: 390 - DNA, 510 bp, homo sapiens
  misc_feature (97)..(97): n is a, c, g, or t
  misc_feature (102)..(105): n is a, c, g, or t
  misc_feature (138)..(138): n is a, c, g, or t
ttcttcatcccactaatattgtcttagatgttgtcaaccaagaaacatttatggtaaggagagcgtactgcatacaactgtattgataatatattcntatgnnnnaaaatactcaatttcttctacttcacttatttnaaacccagacaggactgaaaggtagttgaggtataagactaaaggttttcctgggtttcacaagtttcccaagttccttttgagagagcgggagggagtgaaacaagaagggaaggtgatcataaaggaattgctaagaagaaaaagaatgcacacctaaaaacaaaataaacaaccatcggcatgtcatgatttgcagcctgacaaaagggctcacctgcatgtctctggacttagtataagcaatttttccttcaaaaataaaatcttatcagtcaccactaaatccatgaaccatattactgaatagaacctccacaaaatccatgaactatgttgctgaatagaacctttactattctgcttctattt

SEQ ID NO: 391 - DNA, 553 bp, homo sapiens
  misc_feature (105)..(105): n is a, c, g, or t
  misc_feature (136)..(136): n is a, c, g, or t
  misc_feature (142)..(142): n is a, c, g, or t
  misc_feature (155)..(156): n is a, c, g, or t
  misc_feature (481)..(481): n is a, c, g, or t
aacaccaattatgcaaactacttttttttccagcagaaagggagctgacatgatcaaatccatgttttcaaatgaactgaaaaaggcatccagcaccacttatancacatttatttcagttccaggctgacagccntggggnatctagcaggatnnataattgtcatctggtgagagttgggactttgctcaattttaataccaatctctcctgattgtaattacctccactactttcatgatccccctacaatatttttttaaatgatatatttattcactgaatcaaatgtcattaatgagttatcttctgtggaggatgactgttctctttgttaatgttcacaatcaagatcttgggctgagaagaggcccttcacccaaggagtttgaagtatcacagcgtgtgggaaggtgggaaccaggatacccattcatttccaaccgagacacagagaagtgagtcacagaatttgagccngctctcttgactgcccagccagagacactgatttctgtaacctcttcacttgatcctgcctcttaagcatta

SEQ ID NO: 392 - DNA, 521 bp, homo sapiens
  misc_feature (96)..(96): n is a, c, g, or t
  misc_feature (102)..(102): n is a, c, g, or t
  misc_feature (354)..(354): n is a, c, g, or t
gagtccaaatgtcatcagtgctcattttgagataccctgctatcgatggtcgctacaaaccaggaaatactcaagttattatgtgtatacattggntttagntttatgaaacaatttaccttcatgatctcatagttaaaattgtaataaatttaggaatataaaggatcaatatgggaagcaaaatttctaaaggcagtttctgttgttttaattagtatttgtgtagttcaaaccaggaaggatttgactatcattagattttgcttaactttatgaaagctaaaatattctctgttataaaggggcaactccatctggtcctatagcatctttactactgatttttttttngtttaatttgaaaatgcaaagaattgttaaatgttcttaaatgttctcactacaaaaaaagaaaaaagataactacgtgaggtgatggatatgttaattagctggattgtggtaatcattttggaatgtatatgtatatcaaaacatgtagtacaccctaaatatat

SEQ ID NO: 393 - DNA, 319 bp, homo sapiens
aatgaatgacgttggctttcgtataaggaatttagaaaaagaataaccaattattccaaatgaaggtgtaagaaagggaataagaagaagaagagttgctcatgaggaaaaaccaaaacttgaaaattcaacaaagccaatgaagctcattcttgaaaatattaattacagtcataaatcctaactacattgagcaagagaaagaaagagcaggcacgcatttccatatgggagtgagccagcagacagcccagcagatcctacacacattttcacaaactaaccccagaacaggctgcaaacctataccaatatacta

SEQ ID NO: 394 - DNA, 428 bp, homo sapiens
  misc_feature (116)..(116): n is a, c, g, or t
gctatcatttgtaactgtatcccctgtattaaatctcattaaccacaggcagctgttacagaaagctgcattgtttcacattgagctgttacattagttcaggctaaatgttgggngctccaaccacatccaagaataaatctggaaacacactgctgggatactgctgttagagcccttcttggccttgtattcccagaaatgagctccctttccttagcttagaagaatgtgattatatccaggacatcatgttcagaaaacttagtttactttcagcatagaatgcattactgttggaataattggcctctagctcttaaatgtctctgataacttattaatatctatctttataaaatagagtgcaactacttttgtgtaaaaatgtttgcctttaaatttagtatttcatatcagcacatcga

SEQ ID NO: 395 - DNA, 482 bp, homo sapiens
  misc_feature (237)..(238): n is a, c, g, or t
  misc_feature (296)..(296): n is a, c, g, or t
  misc_feature (338)..(338): n is a, c, g, or t
  misc_feature (452)..(453): n is a, c, g, or t
ccctgaggttgcaggtctgggatcaggactctggcagggacgatgacctccttggcacctgtgatcaggctcccaagtctggttcccatgaggtgagatgcaacctgaatcatggccacctaaaattccgctatcatgccaggtgcttgccccacctgggaggaggcacctgcctggactatgtcccccaaatgcttctgggggagcctccaggaaaccggagtggggccgtgtggnnagagaacagtgagcttggaaaggaccagtatgcttggactgaaggggttctcacagtngggagccagggctgtcttcgtattcccattagaccaagcttntccaacccgaggcccgcatgcggcccaggatggctttgaatgcggcccaacgcaaattcgcaaactttcttaaaacattatgagtttctttttgctattttttttttttttttnnagctcatcggctatcgttagtgctagtgg

SEQ ID NO: 396 - DNA, 432 bp, homo sapiens
aagtgcttcaagtattagttgtcatattaatccaagagaaaattagatctgagactacctcgaggagtaaacgaacaacttctttaaaccaatactagtcaaaatgcagtccacggaccaatgctggttcatgccctatttgatccaagtccacattaagtacagaaatgaagagtaagcatttagaaacttggggcaatttgacattgcctcaacatccaagtttcagtgtcctttataaactattgatccatgacagatcatgaaactttctaaaaattgatccttttatcacatagtctttcaaaatattatttgcttctttgaagctttggatagaaacttgataatgtgaagttctctgctatgtggacctggtgtgcttatcttctttgttgctgatttgagagctgagctatgtactatatctgg

SEQ ID NO: 397 - DNA, 455 bp, homo sapiens
gaaatttttgtcactcccagaggtgagacaagccatccacgtggggaatcagacttttaatgatggaactatagttgaaaagtacttgcgagaagatacagtacagtcagttaagccatggttaactgaaatcatgaataattataaggttctgatctacaatggccaactggacatcatcgtggcagctgccctgacagagcactccttgatgggcatggactggaaaggatcccaggaatacaagaaggcagaaaaaaaagtttggaagatccttaaatctgacagtgaagtggctggttacatccggcaagcgggtgactcccatcaggtaattattcgaggtggaggacatattttaccctatgaccagcctctgagagcttttgacatgattaatcgattcatttatggaaaaggatgggatccttatgttggataaactaccttcccga

SEQ ID NO: 398 - DNA, 275 bp, homo sapiens
gtgggcacgataatagcaactgagctgtcacagcctaccagcaggctggtaacacctccagggtctcttggctagagcagatttcttagcagctgactaggacttcagtcattgggaagcctatgaggcctttacatttttggtgtgagatggggaagaaacataaaatgccactttacaacttcaataatagcctgtaatttatatttactgtgtgaatttttagtcctatattttaataatttgtaaattgatctcttattccaagaatcctt

SEQ ID NO: 399 - DNA, 289 bp, homo sapiens
tgttcatgaagactcccttacagttgtttttgaaaataattggcaaccagaacgccaggttccatttaatgaagttagattaccaccaccacctgatataaaaaaagaaattagtgaaggagatgaagtagaggtatattcaagagcaaatgaccaagagccatgtgggtggtggttggctaaagttcggatgatgaaaggagaattttatgtcattgaatatgctgcttgtgacgctacttacaatgaaatagtcacatttgaacgacttcggcctgtcaatcaaaat

SEQ ID NO: 400 - DNA, 393 bp, homo sapiens
ggggatcattttggcatctgcttccttctctccaaattttacccaagtgacttctacactgttgaactctgcttacccattcataggaccctttttttttatcatctctggctctctatcaatcgccacagagaaaaggttaaccaagcttttggtgcatagcagcctggttggaagcattctgagtgctctgtctgccctggtgggtttcattatcctgtctgtcaaacaggccaccttaaatcctgcctcactgcagtggaactctctctctgatgctgatttgcactctgctggaattctgcctagctgtgctcactgctgtgctgcggtggaaacaggcttactctgacttccctgggagtggacttttcctgcctcacagttacattg

SEQ ID NO: 401 - DNA, 277 bp, homo sapiens
aactggattcactttacaatttgcaaaacggctgcaggtcaacctattggtcaagccatcagaaaaaattcaagtattaaagaatctgaagaggaactatattgtgcctattctttggcttaatgagactgggaccattggtgatgagaaggcaaacatgttcagaagtcaagtaactggaaaaataaacctccttggcctgatagaaatgatcttactcagtgttggtgtggtgatgtttgttgcttttatgatttcatattgtgcatgcagatcg

SEQ ID NO: 402 - DNA, 446 bp, homo sapiens
taacaggcaccttatctactcattagtgaagagataattggattacacaggcaggcttgtttactacatccagaatgtagaaactgctttcttcaacatcttggttctagctagtaataacaatataattctttggcagatattcagaataacattttaaactacattttcttagaaaattgcattcttgtagtgagcagtgtatggtctcttttgttcagaatttaaaactgataaccaatgaaagccttttctcttattcctctaccgtcatttacatgataatctgaagctaatatgacaatatttaaatactaagtggtactagggaactacaagaatactgtaaagcttaagccattgttatcactgtcatttagcatttaataacaaaactatacagaattatgtgcataccaatgaatgttttgtaccatctagttaaa

SEQ ID NO: 403 - DNA, 327 bp, homo sapiens
gaaaatattcctgacgtggtcccgggcagccatctgactccaatagagagagagagttcttcacctttaagtagtaaccagtctgaacctggcagcatcgctttaaactcgtatcactccagaaattgttctgagagtgatcactccagaaatggttttgatactgattccagctgtctggaatcacatagctccttatctgactcagaatttcccccaaataataaaggtgaaataaaaacagaaggacaagagctcataaccgtaataaaagcccccacctcctttggttatgataaaccacatgtgctagtggatctacttgtg

SEQ ID NO: 404 - DNA, 372 bp, homo sapiens
ttctctacttcgctcttggaacataatttctcatggcagcttttactaaactgagtattgagccagcatttactccaggacccaacatagaactccagaaagactctgactgctgttcttgccaagaaaaatgggttgggtaccggtgcaactgttacttcatttccagtgaacagaaaacttggaacgaaagtcggcatctctgtgcttctcagaaatccagcctgcttcagcttcaaaacacagatgaactggattttatgagctccagtcaacaattttactggattggactctcttacagtgaggagcacaccgcctggttgtgggagaatggctctgcactctcccagtatctatttccatcatttg

SEQ ID NO: 405 - DNA, 371 bp, homo sapiens
agcagggattggggtcacacccttcgcatccattctcaagtcagtctggtacaaatattgcaataacgccaccaatctgaagctcaaaaagatctacttctactggctgtgccgggacacacatgcctttgagtggtttgcagatctgctgcaactgctggagagccagatgcaggaaaggaacaatgccggcttcctcagctacaacatctacctcactggctgggatgagtctcaggccaatcactttgctgtgcaccatgatgaggagaaagatgtgatcacaggcctgaaacaaaagactttgtatggacggcccaactgggataatgaattcaagacaattgcaagtcaacaccctaataccagaa

SEQ ID NO: 406 - DNA, 488 bp, homo sapiens
gaacagcgaacaggcaggactctgatgaacaagaccctcaggaggtgacatacacacagttgaatcactgcgttttcacacagagaaaaatcactcgcccttctcagaggcccaagacacccccaacagatatcatcgtgtacgcggaacttccaaatgctgagtccagatccaaagttgtctcctgcccatgagcaccacagtcaggccttgagggcatcttctagggagacaacagccctgtctcaaaaccgggttgccagctcccatgtaccagcagctggaatctgaaggcatgagtctgcatcttagggcatcgctcttcctcacaccacaaatctgaatgtgcctctcacttgcttacaaatgtctaaggtccccactgcctgctggagaaaaaacacactcctttgcttagcccacagttctccatttcacttgacccctgcccacctctccaacctaactggcttacttcctagtctact

SEQ ID NO: 407 - DNA, 512 bp, homo sapiens
ggctgcgcaattactactatgacgtggtgaactaaccgctcccgcacctgtcggtggctgcctttgatcacaggagcaatcacaggaaaatgtatccagaggaattgattgtcagccacctccctctgccagtcgggagagccaggcttggatggaacatgcccacaacttgtcacccaaagcctgtcccaggactcaccctccacaaagcaaaggcagtcccgggagaaaagacggatggcaggatccaaggggctagctggatttgtttgttttcttgtctgtgtgattttcatacaggttatttttacgatctgtttccaaatccctttcatgtctttccacttctctgggtcccggggtgcatttgttactcatcgggcccagggacattgcagagtggcctagagcactctcaccccaagcggccttttccaaatgcccaaggatgccttagcatgtgactcctgaagggaaggcaaaggcagaggaatttggctgcttctacggcc

SEQ ID NO: 408 - DNA, 408 bp, homo sapiens
tttagacatttccttcttgctacttgactttccttgactggtgggttttttttccttgatctcttcttcctcaggtaatccaggatcctggggcacatagacttcttgctgcgatacagttggaaacaagtaagtctacagaatgtttcagtttcccagcaattccaggtctaaggcgcacagttcccttttaggggaagaaacaacttttttacttacaagtctaagaagagtccacatcaatctaaaaacccactccagggaccaggacacattcagaccacccactgtccactttttcaagagcaacactgttcttacctgtattgccacaaggcactgattttccatataggcaacagttctgtttccatagatctaaacttttccacttttcatgcaatgagc

SEQ ID NO: 409 - DNA, 551 bp, homo sapiens
  misc_feature (250)..(250): n is a, c, g, or t
  misc_feature (296)..(300): n is a, c, g, or t
aaaaagtacaacacagctgggcatggtcacacctgtgatcccaacactgggagactaaggcagtaggattgcttgatgccaggactactctggtcaacctagtgagaccctgtctctacaaaaaataaaaacattttctaagtgtggtagcacaccctgtagtcccatctacatgggaggctgaggcaggaggattgcctgagcccaggagttcaaggctacagtgaaccaagatcacgtgatggcagtnccagcatgggtgacagtgagactgtatcaaaaaaaaaaaaaaaaannnnnttggctgggcacagtggctcatacctgtaatcccagcactttgggaggctgaggtgggagaatcagttgaggtcaggagttcaagaccagcctggtcaacatgatgaaaccctgtctccattagaaatacgaaaattagctgggcgttctggtgtgcctgtagtcccagctacttgggaggccaaagcaggagaatcgcttgaacccgggaggtggagattgcagtgagctgagatctaccactacacccc

SEQ ID NO: 410 - DNA, 188 bp, homo sapiens
gaagtgtttcgttgtataatgctggatcatgtggttagctaattatgtggctcagaattagtatttctaagcaagggaccaaccatagggccaagtagtatctgttatgtaggctttaaaacatggggagagaaagaggaggtaaggataaaggaaaagaacatacgtgtgttaggaacccctttgat

SEQ ID NO: 411 - DNA, 420 bp, homo sapiens
aagacctgggattttatcatgcagatgaaacatccaggtagcaagcttcagagagaatagactgtgaatgttaatgccagagaggtataatgaagcatgtcccacctcccactttccatcatggcctgaaccctggaggaagaggaagtccattcagatagttgtggggggccttcgaattttcattttcatttacgttcttccccttctggccaagatttgccagaggcaacatcaaaaaccagcaaattttaattttgtcccacagcgttgctagggtggcatggctccccatctcgggtccatcctatacttccatgggactccctatggctgaaggccttatgagtcaaaggacttatagccaattgattgttctaggccaggtaagaatggatatggacatgcatttattacctc

SEQ ID NO: 412 - DNA, 507 bp, homo sapiens
aaattaccatgattgctttatgtttatatttaacttgtatttttgtacaaacaagattgtgtaagatatatttgaagtttcagtgatttaacagtctttccaacttttcatgatttttatgagcacagactttcaagaaaatacttgaaaataaattacattgccttttgtccattaatcagcaaataaaacatggccttaacaaagttgtttgtgttattgtacaatttgaaaattatgtcgggacataccctatagaattactaaccttactgccccttgtagaatatgtattaatcattctacattaaagaaaataatggttcttactggaatgtctaggcactgtacagttattatatatcttggttgttgtattgtaccagtgaaatgccaaatttgaaaggcctgtactgcaattttatatgtcagagattgcctgtggctctaatatgcacctcaagattttaaggagataatgtttttagagagaatttctgcttccac

SEQ ID NO: 413 - DNA, 444 bp, homo sapiens
  misc_feature (266)..(266): n is a, c, g, or t
gaagggggaaggtttatgacaggatttcagagaccagagataattaataattaatgtacagtacactaaaaaaaaccatctgtaccccactattaataagtacaaaaaaccctaaggcttaacgtcatagtactggttattcataggataattatacgttgtatatatagaaaggaagtgatatgagtgatgaacagttcatttgtgctcatagttaactacgtaaacatgatactgagtccagttaaccaccaggccagtgcctngctttgatatttgtaccagatgtgtttggtggtcagcgtttaccatgatccagaatattctaatttttgaaggtcaaaaactttgagtgtttttataaaataacaaaaaactgaaaaatgcagaaaagtataaagatggtaatctctgtaggaaattagtccccattatttagctgta

SEQ ID NO: 414 - DNA, 427 bp, homo sapiens
gaactgagtcaatatggcaaggtgtatgtgatctgtgggagttatgccatttaacataggaagtgcatgggactttccctctctgcactccagctcttactgtaccattagaagatgcagaattctgttggtgtgcaaaaagtatagccttacattcaagcagaatggatctgaagaaagcagcaatatctgttactagagaacattcccatgtgtttaaactcttcacttcttagatgcatttaaattcttaatgcaaatgacgtagcaatttgaaaacttctccgtattacttgtgtttaaaatgtcttgctttaaatacaaaacaaatggtaaaggggattatcttttgtttagatggttaaatattatttttgccttagatagctttgtaataatttttctccagacagttcaacacttttga

SEQ ID NO: 415 - DNA, 481 bp, homo sapiens
ccctgctcaggtctagaatcccaagcagtgtcctttcctggtgaacactgtgagccgcagatgtgacttttttttaaagtcatctcttcagcaatccagaggttccttgacctcattatttgtcctatctctcccttatagtcctaagccaagacatttgacctttgacatttgacctttgcagtgtcatgtgagggcgtcagtatagaggcctttgcatctgggcctggcacccgctctctgcctctggaggctaaaccctgtctggatttctcttgggatctaacgtgggatcttctggacagacaaccgtgacatcagcagtgctggtgctgctgtgtgtggactgaacacctgcactttgcagaggacacgctgcatgggccccgcttgcggttcattcaggcctgctgcaggagctctgagaacaagaaagagtggacacccgttcccctgcatcatctgtcttgcgtgctatttc

SEQ ID NO: 416 - DNA, 371 bp, homo sapiens
gatggtaaaggctgttcaaccccaagagatgagtcagatgaagccccatgtgtatgatctgccagtagaaggcaatgagcccccagcctcttttcataaagacacaaacgcacttccccctactgttttcaaggataatccaatgtctacacctaaggactcaaatccagaagcatgaagcaacagctaagcaagaactaatggttaaattatcaacttggaaaacttggaaaatctggatgccagagaaatatactatctcaccagtatttgctctcgactcaagaaggttaacattttctgattcatgttagactttgaagagactaaagaaaattttcaagaggaacatatgcctgagaacctttgca

SEQ ID NO: 417 - DNA, 430 bp, homo sapiens
aaagattacacagttcttctggactgttaaattgtgcatggttttggaccccttctgctctactacagagagtgaagaagaaagtattaaagctcactttaccattccatatacttactaaaagcctgtgtaaacatgtcttaatgaatgttgttgaaagcaatgtaaatagttgaaaatataaatttatattacagtttaagaaaaccttatgaggcatcactagccactgttaatatctatttgtattcttataccttttcaatatatttgaacaaatatagtttctggcactatttttatactaggaaaaggagttactatgtatattatgcttagcttttaaggcattttaaataaccatgaatgttgatttcattactttcctttcctccatcacgagagtcatttcagatgactctttcatgac

SEQ ID NO: 418 - DNA, 573 bp, homo sapiens
  misc_feature (318)..(318): n is a, c, g, or t
agtgtttgagccaaggttgccacctgtctcttaacatctcactgaacataagtcctgaggtattaggacgaccatactgcctctgagctgaaaacattcaaaagttcacatccctgtttgggggataccattcaccgccttcagcccagatgatactttcctttaaatctgtgtctctgtgtgtataacaaagaggaagatggaaacaatgttcatggaaactgctgttgagccccttgtcccaccactcccgccatctgctgcaggcaggaaggcatgtgagtgtacgttttcttccaggagacatcaggtcccccnggattcaaattaagtgcaatattttgcaaacagctcttcttagggaaatctcctgaaggaaaaaaatgtgacagaatgttccatagtctgagagaatggaatcgttgagcatttagtacaagtccagtgtgtgtgagcgggacttaggcagctcaagcttgcttttttttttaagcgtacaattgagtggttttagtaaattcacaaacttgttcaaccatcaccactatctaattccagactcacgctttttta

SEQ ID NO: 419 - DNA, 539 bp, homo sapiens
cacctgtgctctgattaaatctacatcaattgtaaatgtcgatttgattttaaagtttttttttaatgcgactattttttatctgaaaagtaatccattacacttttctatgttttatacatttcaaaagggagggaaattccaaagcctgaataatggaatggatacatttcaatttaacatatattctggctttagatcccgacattcactcctgtgcaaattacttaggtatgacttaggctaattttaagctaataagtgaaggtacattcactccctcaagagaatcaatactcagaaggttacaaagttttctttatagaatttcaatcaatcattccatctaaaaccttaaaatctctacaggactacataacataaatactgccagtttataaacgattgcctatctgaatttttatacctaccactactttaatttatacagttagttagcaaattagcaacccagtaagtacagttatcaaaaatactaggaaactatatccatatcgcttttggtgtcagattgtatc

SEQ ID NO: 420 - DNA, 286 bp, homo sapiens
  misc_feature (246)..(246): n is a, c, g, or t
gaggtttgttaatacgttcgccatgtgctacgatcttgggacgaactgagccacgagcgtggctttgagggccgtccgaacgctgcaggccggccaggtccctgggcgtccaggcctggcctacgcaccactttgtcccttagcgtttaaaggtttcttcccgaatctcaggccctcagctacctgcaggtttcgtcgcgagccggctgcaagttttgaacctaagtaaacctcaatccggagggnctagcggtaaggtgggcgctgtgtctattgaggtgcttag

SEQ ID NO: 421 - DNA, 254 bp, homo sapiens
ccgcgacagcgcctgggagaagggcacggatcgccggcggaacgctccgagccaggtcgagtacagatgttttcccattggcaagtggacgagaacgttcttcagaagtgttggtgttggcacagaagccctgtttcctgctgcgctggtgtgaccagtggctgctgggggtggggttagggaggtggttgtggccaggagggcgggaggtggccaaggccggcccctgggagggtgcagtgctaggacctccc

SEQ ID NO: 422 - DNA, 408 bp, homo sapiens
  misc_feature (173)..(173): n is a, c, g, or t
gtaatctgaagaacttttgccctttttaccccatttactgtaactcttgtttctaggtaatcgttctctctcaacaaacttctcaagcgtctgtgtaacaagccacatgttctaacaaattgtctccatcgcacttcaacagccaggtccctattttttataacgtattaacnttattattttcttattattttaaaagaatctatgcacattagcaaaatttaaaagatagagaaaaatataaacagaaaaaattatgtttacttctaccaccctaaatcaactattatcaattttatacatattttactccatcttttttcaaagtttcttacattttccaatgtcattaaaattctctgtgaatgtaaattttaaaaactgtacctactgttttttggaaatctg

SEQ ID NO: 423 - DNA, 286 bp, homo sapiens
acaagctggccttgtgttgctggttcctattcagtatttcctggggattgtttgctttttaagtaaaacacttctgacccatagctcagtatgtctgaattccagaggtcacatcagcatctttctgctttgaaaactctcacagctgtggctgcttcacttagatgcagtgagacacatagttggtgttccgattttcacatccttccatgtatttatcttgaagagataagcacagaagagaaggtgctcactaacagaggtacattactgcaatgttctctta

SEQ ID NO: 424 - DNA, 504 bp, homo sapiens
  misc_feature (26)..(26): n is a, c, g, or t
  misc_feature (28)..(28): n is a, c, g, or t
  misc_feature (38)..(39): n is a, c, g, or t
  misc_feature (41)..(41): n is a, c, g, or t
  misc_feature (43)..(44): n is a, c, g, or t
  misc_feature (46)..(48): n is a, c, g, or t
  misc_feature (66)..(66): n is a, c, g, or t
tatgttcacttcaggagccacactananattctgcatnncntnnannnggacaaagtttcagcacnttctgcctctcctaatactttacaaatgagattacatttgaatttgctaatactttatgagcaggcaatgaggtttccaaaatctcatctaaatactctccaatctattagcaaaaatcagagtaaaatacagaggaaaggcactgctttctgttaattgatttaacatgcatgaattagctccctctgagttccaggcactatgctgagagtacaaagaagacacaagtctgctttcaagcaactcactgtgaaagtgtttttgaagggaggaacagaaatgagacccctatctttccctataaaaacaacatttttactgtcttttgcctgccaatctgtatttgaaaccattggacactgattctctggcctgggactttggcattgatggttttctgcctttcttctcagcctctgcctctattgcatttatta

SEQ ID NO: 425 - DNA, 349 bp, homo sapiens
  misc_feature (143)..(143): n is a, c, g, or t
  misc_feature (315)..(315): n is a, c, g, or t
  misc_feature (319)..(319): n is a, c, g, or t
gaagagtgcttaaggttgaagtacaatggcacaatctcggctcacctcgacctctgcttcctgtattcaagtgattcttctgcctcagcctcccgagtagctgggattacaggcatgcgccatgacacttggctaattttttngtgtgtttttagtagagatggaattttgccatgttggccaggctggtctcaaactcctgacctcaagtgatccacccacctcgacctcccaaagtgctggtattataggcatgagccaccatgcctggcctcatttatttttaaatagctgcagtaatcccggctttagatnaaancacatgaactaataatatcactagtgttca

SEQ ID NO: 426 - DNA, 495 bp, homo sapiens
  misc_feature (171)..(175): n is a, c, g, or t
tttctcagtttcagatcctctgctattttattgagtggaaagtcttgagctaaaagggttcaagaagaataatgttgcatttccttatgtctcaggaaacactttttatggtaacttgtcagattgtctatgaacaaacccacttttttagacattgataaagtcttcttnnnnncacgtgatattttatacaagaacacttcagatgtattagatgtgactgattttaacaaatcctattagatttgtatcaactagttacatgttctattcatagtcttttgtgaatcattgcctttttgtttaaaaagatggcctattttgagcctttgtataggtacattcctgtttttgtgacaaaagaaaaactttaaaattgtcccaaacagaaaaataatggctatcagaagtatgttttgttttagtgtgagttaccgttactgtatttgtttattgtaaaggtggacatttagcgttcagtgcagttttcaataa

SEQ ID NO: 427 - DNA, 545 bp, homo sapiens
acaggaggaatgcaccacggcagctctccgccaatttctctcagatttccacagagactgtttgaatgttttcaaaaccaagtatcacactttaatgtacatgggccgcaccataatgagatgtgagccttgtgcatgtgggggaggagggagagagatgtactttttaaatcatgttccccctaaacatggctgttaacccactgcatgcagaaacttggatgtcactgcctgacattcacttccagagaggacctatcccaaatgtggaattgactgcctatgccaagtccctggaaaaggagcttcagtattgtggggctcataaaacatgaatcaagcaatccagcctcatgggaagtcctggcacagtttttgtaaagcccttgcacagctggagaaatggcatcattataagctatgagttgaaatgttctgtcaaatgtgtctcacatctacacgtggcttggaggcttttatggggccctgtccaggtagaaaagaaatggtatgtagagcttagatttccctattgtgacagagcc

SEQ ID NO: 428 - DNA, 503 bp, homo sapiens
ggcatttgcagtgtgttggtgatccacgaaaggaaaatcacggaagcaggatagaaatccagctgcagacaagacctcaggtcgatgaatcttgacaagcagttgagctgtttttttctactcacctaggacagtcaggcagaagtatgcaaaatgactggggctgattcttttctgaattgtcgcaaacagcaagaggacttgagtcctagcattaaagagttcaacatgtctaggtccaagaccactgttgtgtttgaaggatgtaaaaccctgctgcataggatggaatatttggagggaggatcctgaaaaacatgagggatcaaatagtcctcaactttctaggacaaagggagcagctatttgccatctaccctccagaataaagaaatcttatcattcaccatctaccctctagaataaagaaatcttatcattcgccatctaccctgtagaataaagaaatcttatcattcaccgtctaccctctagagtaaaca

SEQ ID NO: 429 - DNA, 542 bp, homo sapiens
gaatatgacgttaccttgcagactaaaaggttgaaggcccgaaactaacttttagctaacaataagggctgtgccccaatggaaactgagttcattttctgagaaaggtttggatgactgaaatatttcctctacagtcaaggactttggcatgcggtggctgaaactgagcttttttgtgtgggctccagttctcactgttctgcaatgctcatggcaagttgaatggtgagctagcttataaattaaagagctctgaactgtattcagaccgactgggtatctagcttactgttttaacatcattgttgaaaccagaccctgtagtccagtggtgctgccctgttgtgcaaactgctcctttttctcgtgtttttgtaaagagcttccatctgggctggacccagttcttgcacatacaagacaccgctgcagtcagctaggacctttccgccatgtattctattctgtagtaaagcatttccatcaacaatgcctaattgtatctgttatttttggtttaacacacactgattcatact

SEQ ID NO: 430 - DNA, 510 bp, homo sapiens
acacacaaggcctgatcttcgtggtggacagcaatgacagagagcgtgtgaacgaggcccgtgaggagctcatgaggatgctggccgaggacgagctccgggatgctgtcctcctggtgttcgccaacaagcaggacctccccaacgccatgaatgcggccgagatcacagacaagctggggctgcactcactacgccacaggaactggtacattcaggccacctgcgccaccagcggcgacgggctctatgaaggactggactggctgtccaatcagctccggaaccagaagtgaacgcgacccccctccctctcactcctcttgccctctgctttactctcatgtggcaaacgtgcggctcgtggtgtgagtgccagaagctgcctccgtggtttggtcaccgtgtgcatcgcaccgtgctgtaaatgtggcagacgcagcctgcggccaggctttttatttaatgtaaatagtttttgtttccaatgaggcagtttctggtactcct

SEQ ID NO: 431 - DNA, 453 bp, homo sapiens
  misc_feature (178)..(178): n is a, c, g, or t
gttacctacctgtgtagccgaagtagtgtgcagtgaggcgtttctgaatacatggtcagatttttggaaaaaaacaaaaacaaaaaaaacaagtaaagttcaaaaaccgtcaaatgagaaaattgcaagtagtgtgacagagctgattgattttgttgctttcttgattttttttttncaaaatgggtttactaaaatgtagatgacttaactgcctcctccttcgtctgaaaaatgccaatattcaatcatcatgcagcattataacaagccttataagtcctaaagcattaagttgcacttttttgaggaggggtagtgcagtatttctctggccagtatgaatgaagtttatacttaccatatttgatagaaacatagatcaagctatggcacagcgactcatcagatagctagctttgacgtctgggcacaattgaaccaacttccatc

SEQ ID NO: 432 - DNA, 386 bp, homo sapiens
  misc_feature (196)..(198): n is a, c, g, or t
  misc_feature (204)..(210): n is a, c, g, or t
  misc_feature (212)..(217): n is a, c, g, or t
  misc_feature (219)..(226): n is a, c, g, or t
cccttcctgaattccacagtgcaaatatctttctgtaacaccctcagcatcctgcactgccctctctgaaaacacccacattctttggtcactgtgatttcttaggcctccgtctgttgtaccactagcatctatatgacttttgtgtaattttctctcttgaactctggtgctgtttttttgtttgtttgagacnnngtctcnnnnnnnannnnnngnnnnnnnnaattctgtgcagatgtcctgacttggcaattttgtgtccctgcctcactgtctccaccaacccccgcctgtcctagtgttgttctgcctcctgtcctctcttgctctcttgtcagcctctggcttcctcggccccatttcacttcactgagtcctgacac

SEQ ID NO: 433 - DNA, 405 bp, homo sapiens
aagcatgacattcgttcacaatagcactattttaaataaattataagctttaaggtacgaagtatttaatagatctaatcaaatatgttgattcatggctataataaagcaggagcaattataaaatcttcaatcaattgaacttttacaaaaccacttgagaatttcatgagcactttaaaatctgaactttcaaagcttgctattaaatcatttagaatgtttacatttactaaggtgtgctgggtcatgtaaaatattagacactaatattttcatagaaattaggctggagaaagaaggaagaaatggttttcttaaatacctacaaaaaagttactgtggtatctatgagttatcatcttagctgtgttaaaaatgaatttttactatggcagatatggt

SEQ ID NO: 434 - DNA, 489 bp, homo sapiens
aaacctctcttagatctggaaccaaatgcaaggttactggctggggagccaccgatccagattcattaagaccttctgacaccctgcgagaagtcactgttactgtcctaagtcgaaaactttgcaacagccaaagttactacaacggcgacccttttatcaccaaagacatggtctgtgcaggagatgccaaaggccagaaggattcctgtaagggtgactcagggggccccttgatctgtaaaggtgtcttccacgctatagtctctggaggtcatgaatgtggtgttgccacaaagcctggaatctacaccctgttaaccaagaaataccagacttggatcaaaagcaaccttgtcccgcctcatacaaattaagttacaaataattttattggatgcacttgcttcttttttcctaatatgctcgcaggttagagttgggtgtaagtaaagcagagcacatatggggtccatttttgcacttgta

SEQ ID NO: 435 - DNA, 402 bp, homo sapiens
gtgttttggcattactggatccctctcaattatctctggaaaacaatcaactaagccctttgacctgagcagcttgacctcaaatgcagtgagttctgttactgcaggagcaggcctcttcctccttgctgacagcatggtagccctgaggactgcctctcaacattgtggctcagaaatggattatctatcctcattgccttattcggagtactattatccaatatatgaaatcaaagattgtctcctgaccagtgtcagtttaacaggtgtcctagtggtgatgctcatcttcactgtgctggagctcttattagctgcatacagttctgtcttttggtggaaacagctctactccaacaaccctgggagttcattttcctcgacccagtcacaagatca

SEQ ID NO: 436 - DNA, 523 bp, homo sapiens
  misc_feature (29)..(29): n is a, c, g, or t
atccgacttgaatattcctggacttacanaatgccaagggggtgactggaagttgtggatatcagggtataaattatatccgtgagttgggggagggaagaccagaattcccttgaattgtgtattgatgcaatataagcataaaagatcaccttgtattctctttaccttctaaaagccattattatgatgttagaagaagaggaagaaattcaggtacagaaaacatgtttaaatagcctaaatgatggtgcttggtgagtcttggttctaaaggtaccaaacaaggaagccaaagttttcaaactgctgcatactttgacaaggaaaatctatatttgtcttccgatcaacatttatgacctaagtcaggtaatatacctggtttacttctttagcatttttatgcagacagtctgttatgcactgtggtttcagatgtgcaataatttgtacaatggtttattcccaagtatgccttaagcagaacaaatgtgtttttctatatagttccttgccttaa

SEQ ID NO: 437 - DNA, 531 bp, homo sapiens
  misc_feature (280)..(280): n is a, c, g, or t
  misc_feature (367)..(368): n is a, c, g, or t
agagggggcaagtcacatgggcagagatagccgtgtgagcagtctcagctcaagctgccccccatttctgtaaccctcctagcccccttgatccctaaagaaaacaaacaaacaaacaaaaactgttgctatttcctaacctgcaggcagaacctgaaagggcattttggctccggggcatcctggatttagaacatggactacacacaatacagtggtataaactttttattctcagtttaaaaatcagtttgttgttcagaagaaagattgctataangtataatgggaaatgtttggccatgcttggttgttgcagttcagacaaatgtaacacacacacacatacacacacacacacacacanngagacacatcttaaggggacccacaagtattgccctttaacaagacttcaaagttttctgctgtaaagaaagctgtaatatatagtaaaactaaatgttgcgtgggtggcatgagttgaagaaggcaaaggcttgtaaatttacccaatgcagtttggctttt

SEQ ID NO: 438 - DNA, 344 bp, homo sapiens
gttcccaaatttcatacctatcatcttaagtagggacttctgtcttcacaacagattattaccttacagaagtttgaattatccggtcgggttttattgtttaaaatcatttctgcatcagctgctgaaacaacaaataggaattgtttttatggaggctttgcatagattccctgagcaggattttaatctttttctaactggactggttcaaatgttgttctcttctttaaagggatggcaagatgtgggcagtgatgtcactagggcagggacaggataagagggattagggagagaagatagcagggcatggctgggaacccaagtccaagcataccaac

SEQ ID NO: 439 - DNA, 381 bp, homo sapiens
  misc_feature (140)..(140): n is a, c, g, or t
  misc_feature (144)..(144): n is a, c, g, or t
  misc_feature (151)..(151): n is a, c, g, or t
  misc_feature (169)..(169): n is a, c, g, or t
aaggtttgagttggagctagtctgatgcagcagggagccctgttttcatcaccacccctctccccagtctcaggtgtggctgaggggccttggggtccctgatccagcctcctctcttgcatgatgatcaccacccctcncccnagtctcngggtgtggctgaggggcnttggggtccctgatccagcctcctctcttgcatgatgatcaccacccctctccccagtctcgggtgtggctgaggggccttggggtccctgatccagcctcctctcttgcatggtgcctcgcgccccatgctcggccttcagtgctgtcttgaacgtcccaatggagccaccagagtgactttcctaacagaagatatgatctgccttgagg

SEQ ID NO: 440 - DNA, 398 bp, homo sapiens
ggctcccagcaagggtaggacgggccgcatgcgggcagaaagttgggactgagcagctgggagcaggcgaccgagctccttccccatcatttctccttggccaacgacgaggccagccagaatggcaataaggactccgaatacataataaaagcaaacagaacactccaacttagagcaataacggctgccgcagcagccagggaagaccttggtttggtttatgtgtcagtttcacttttccgatagaaatttcttacctcatttttttaagcagtaaggcttgaagtgatgaaacccacagatcctagcaaatgtgcccaaccagctttactaaagggggaggaagggagggcaaagggatgagaagacaagtttcccagaagtgcctggttctg

SEQ ID NO: 441 - DNA, 393 bp, homo sapiens
aacactcttgtggtcaagaaatctgatgtggaggcaatcttttcgaagtatggcaaaattgtgggctgctctgttcataagggctttgccttcgttcagtatgttaatgagagaaatgcccgggctgctgtagcaggagaggatggcagaatgattgctggccaggttttagatattaacctggctgcagagccaaaagtgaaccgaggaaaagcaggtgtgaaacgatctgcagcggagatgtacggctcctcttttgacttggactatgactttcaacgggactattatgataggatgtacagttacccagcacgtgtacctcctcctcctcctattgctcgggctgtagtgccctcgaaacgtcagcgtgtatcaggaaacacttcacga

SEQ ID NO: 442 - DNA, 342 bp, homo sapiens
cttgctgtgagccttttgggtttgtttcctagctccaaatcttaacttggtgtcaagtttcctggctgggagacaagcttttaccgacttcctctgcttgccagcaaagtcatctgctaactggatattggcagcttctctgctgtcttgcagctgcttccggagtgggttccacagggattcccgtgtgttcttggttcagcttgcagagggactttcacactccctggagaccgtttcctcccattctgtctggagttttcggcctaccccaagacaatgagatattcctgacctttccacctatttccctccaaccccaccttccgaaatacatttgct

SEQ ID NO: 443 - DNA, 519 bp, homo sapiens
atcgaactttctttgttgctgctagttaaaacttgttgcaacttttcacttctcttgtgtccaggtatgcagcaaaattctgcaatttcaccttaaagatactgttggttttacagatgctctccaacctattttctataagatgaggtagtggtgaactcagataacaaacttctcttctaaactggttctgcttctaagacaagcatctcctgccctctctccttcctccccatctctcgcacgcagtctagagatggactgagccttgcttctcactggcagtgttgagctttggagatgggatggttgctatgccaagccttgtttctctgctcagaagaagtagagaagctattatcaattaaaagcatgctgtgatgtgactcctggaagtgacgtaggagtgagtggcaggttgtttgatttaataggtatcttaatcaagaattaagcttgcaacattggctttgctcagatgcagatggaagtgtgatcacaatcattttgaatccctct

SEQ ID NO: 444 - DNA, 500 bp, homo sapiens
  misc_feature (77)..(77): n is a, c, g, or t
  misc_feature (181)..(181): n is a, c, g, or t
  misc_feature (207)..(207): n is a, c, g, or t
ctattaccattctaactttcataaaaagttgggatcaagaagcagctgatttcctgccagggcttatattagggggntgattcttaaaggacattaggattggtgctcagaaatggttaatcatgctgtgtgctagccagggccagctggtaccttctttgccatgagcattcaagggacngctaacctttattgacaatctatatngcaaaagtcaggaaagaggttgtgagctgattggattaaagacctggcacttcagtaactcagcacgcttccacttcactcaacttaagagagttcattgacagtgttaggatgtgaaggctgggaaacacttattttgcttcaagagttccacttggctctcccaaataggtacctcaaaaactgttagcaagcggcatttggatgtcttgacaggggctttgcagggatttttagggttttttccacattgtccacattaatggttggcatgattgtgcttgcaggccaag

SEQ ID NO: 445 - DNA, 144 bp, homo sapiens
tctgcaccttcatccttaatatgtcacagtttgtgtgatccagcgtcatttccacctgatggggcaactgtgagcattaaacctgaaccagaagatcgagagcctaactttgcaaccattggtctgcaggacatcactttagat

SEQ ID NO: 446 - DNA, 525 bp, homo sapiens
atatgggctgtcgttacactgtgtctgggtctggttcagggatgctggaaatactccccaaggaactggagctctgctatcgaagccctggagaagaccagctgttctcggagttctacgttggccacttgggatcagggatcaggctgcaagtgaaagacaagaaagatgagactctggtgtgggaggccttggtgaaaccaggagatctcatgcctgcaactactctgatccctccagcccgcatagccgtaccttcacctctggatgccccgcagttgctgcactttgtggaccagtatcgagagcagctgatagcccgagtgacatcggtggaggttgtcttggacaaactgcatggacaggtgctgagccaggagcagtacgagagggtgctggctgagaacacgaggcccagccagatgcggaagctgttcagcttgagccagtcctgggaccggaagtgcaaagatggactctaccaagccctgaaggagacccatcctcacctcattatggaactct

SEQ ID NO: 447 - DNA, 539 bp, homo sapiens
ggcatgtctctgagcttctatacctgctcaaggtcattgtcatctttgtgtttagctcatccaaaggtgttaccctggtttcaatgaacctaacctcattctttgtgtcttcagtgttggcttgttttagctgatccatctgtaacacaggagggatccttggctgaggattgtatttcagaaccaccaactgctcttgacaattgttaacccgctaggctcctttggttagagaagccacagtccttcagcctccaattggtgtcagtacttaggaagaccacagctagatggacaaacagcattgggaggccttagccctgctcctctcaattccatcctgtagagaacaggagtcaggagccgctggcaggagacagcatgtcacccaggactctgccggtgcagaatatgagcaatgccatgttcttgcagaaaacgcttaacctgagtttcataggaggtaatcaccagacaactgcagaatgtagaacactgagcaggacaactgacctgtctccttcacatagtccatatca

SEQ ID NO: 448 - DNA, 349 bp, homo sapiens
gaatcgttctagtgtttttgccgaagattaccgctggcctactgtgaagggagatgacctgtgattagactgggcggctggggagaaacagttcagtgcattgttgttgttgctgtttttggtgttttgcttttcagtgccaactcagcacattgtatatgattcggtttatacatattaccttgttataatgaaaaaactcattctgagaacactgaaatgttatactcagtgttgatttcttcggtcactacacaacgtaaaatcatttgtttcttttgactcaaattgtattgcttctgttcagatgatctttcattcaatgtgttcctgttgggcgttactagaa

SEQ ID NO: 449 - DNA, 446 bp, homo sapiens
ggcttcatttcaagagtcatccagcaatgagagaatcctgcctctgtagaccaacatccagtgtgattttgtgtctgagaccacaccccagtagcaggttacgccatgtcaccgagccccattgattcccagagggtcttagtcctggaaagtcaggccaacaagcaacgtttgcatcatgttatctcttaagtattaaaagttttattttctaaagtttaaatcatgtttttcaaaatatttttcaaggtggctggttccatttaaaaatcatctttttatatgtgtcttcggttctagacttcagcttttggaaattgctaaatagaattcaaaaatctctgcatcctgaggtgatatacttcatatttgtaatcaactgaaagagctgtgcattataaaatcagttagaatagttagaacaattcttatttatgcccacaacc

SEQ ID NO: 450 - DNA, 547 bp, homo sapiens
gaagggcgggaactgggtgagcacctggggcaggtgggtggttaaggtccttcccacttcgcaggtgtcagaacctagggctgggctctcggggccaggcaggccagcccagcccacgccgagctgggcagcgtctgctctggtaggactgtcagacgcacacgcgcacgcacctagacacacccactcatgtacatgctcacacatgcagacacacctgggcgtcccgaggtcacatgttctggggatgatggccttcaggggtcatctggcaaacagcccctgggctgtgcctggatccccctctagctcctgctcacccacgcccacccagtagtcctgcctgtctgcacaggagaggggcttctcttcctggctggggctggggtgaactggaggctggttaagttgcagccgctgggtcctcgggggcttactcatctcccttttttaaacaaaaagcaaaaaagtaaaatgctgcactgcccagcagcccggttagggctcctggagccaccttaggaaagggcttctcatgagctctgct

SEQ ID NO: 451 - DNA, 485 bp, homo sapiens
aattgtgctcttttctaatccaaagggtatatttgcagcatgcttgactttaccaattctgatgacatctttacggacactattatcactaagaccttgttatggcgaagtctttagtctttttcatgtattttcctcatgattttttctctttatgtagtttgactatgccttacctttgtaaatatttttgcttgtgttgtcgcaaaggggataatctgggaaagacaccaaatcatgggctcactttaaaaaaagaaagaataaaaaaaccttcagctgtgctaaacagtatattacctctgtataaaattcttcagggagtgtcacctcaaatgcaatactttgggttggtttctttcctttaaaaaaatttgtataaaactggaagtgtgtgtgtgtgagcatgggtacccatttgataagagaaatgcatttgattgtgaagaagggagagttaaattctccattatgttcgtggtgta

SEQ ID NO: 452 - DNA, 285 bp, homo sapiens
aagtgctcagaccttgtctagttatttataaactgtatgtacctccctcacttctctcctatcactgctttcctactctccttttatctcactctagtccaggtgccaagaatttcccttctaccctctattctcttgtgtctgtaagttacaaagtcaggaaaagtcttggctggacccctttcctgctgggtggatgcagtggtccaggactggggtctgggcccaggtttgagggagaagtttgcagagcacttcccacctctctgaatagtgtgtatgtgt

SEQ ID NO: 453 - DNA, 537 bp, homo sapiens
  misc_feature (181)..(181): n is a, c, g, or t
ggacagcagacacatgttgcctgtatgtgaaatgtaaaatgtaaaatgtaaaatgttttgtctacaagcaatcgtagtgcactgtggaaactcactgcttccctgttaggtaatgcaagtctaaagactactccagtttatcctctctgcctccttatcttctcaatgattgtttcatttntaaatgcccattccttttcagtcgtaccatatgtcctcatctccctttagttttctttttgctattaatagttttagcttttcagtctaatgtctgatgctgatgtcctctatttagcagggatggtgagagaaggtcagctaaatggctcatctgcagcacacagtgaaataagaggtatactgtttcctattctactatttatcactctgtagcagaaagtctttctaggtccttggttaagaatatagagaatgttactttggacctcacattgccaaattttaaaaaacactgtagagaatgattttcctctcctacccattaaggattctatcttttcctatcaagtctat

SEQ ID NO: 454 - DNA, 351 bp, homo sapiens
tagaacttccaaatgctgagcccagatccaaagttgtcttctgtccacgagcaccacagtcaggccttgaggggatcttctagggagacaacagccctgtctcaaaaccgggttgccagctcccatgtaccagcagctggaatctgaaggcatcagtcttcatcttagggcatcgctcttcctcacaccacgaatctgaacatgcctctctcttgcttacaaatgtctaaggtccccactgcctgctggagagaaaacacactcctttgcttagcccacaattctccatttcacttgacccctgcccacctctccaacctaactagcttacttcctagtctacctgaggct

SEQ ID NO: 455 - DNA, 547 bp, homo sapiens
  misc_feature (42)..(42): n is a, c, g, or t
  misc_feature (59)..(59): n is a, c, g, or t
  misc_feature (235)..(235): n is a, c, g, or t
  misc_feature (361)..(361): n is a, c, g, or t
tttaccaaagtcacgattagctgcttgtggtggggccccaancgccctcgggcactggnggagctgggctggggctgctgctctggggtctccgggggccacagcttggggtgagttgaagacctcaggggatgtggaggggtctgcggggccctggccgcacaggatggccttcagggaaggtggtcttggggcatggtgcagagcaggtgaccggagggaatcggtgacggancggggccaagggaggggtccggagggagtcagggatggagggcagagggagtggatgtgggggtttgaggacgtgtgacaagctccagcaggggtgggggccgggctgagggtgggggtgcgaggnggtcactcccatcgtgcccctggccgtccctccactcacccacacctggcccagtccacgttgaggtccaggactgggaaggaccgggtgagtgcaccggggacccaggccaggtgccccccggagcctgctggggtggccagagcaggagggggtgtgtttcctttttgtgggtgttgcatgcaa

SEQ ID NO: 456 - DNA, 375 bp, homo sapiens
ggtctgttcttgaatcctctattaattactgtgtgtgagccagagggagctgtggtaagggttgggcccccagcctgtagggaactttctggactcccactctttgaatcgatataggcatttggtctcactacttgaccattctcaccctgtgaaacgtcccacactttgaagcaaatacaattcacagcacagtacacacaaaaaccttggcataagacagagaaggttcttcttattttgtgggctggttgctgtagaaacatataacaaagggcagccctccacttctggtataattgtgtagccccttttctttgggcttgacacctgtcttgaataagagtgattagagctgcataatgtccctctctt

SEQ ID NO: 457 - DNA, 509 bp, homo sapiens
ggagtacaccggagcatggtagcagtaaagatagggctgcactgtgttgagtattcatttcaatagtgttgtgtccacctcactaatggggctacttctgtgtttaggccgagaggaggcagattgacatgaaattgcaaggctttcttaacgcacagaggaagacctcaggtcacacatggctgagagatggttggcaatggcttgctatgccactgaaaactaaactctcagaatacaaatccttgagccttactcaagactgcatttctctgtcatttattggccactgtctgatattctttcttctagatatagttgctgttagtgtgaatgatcatgatctgtactttgaacaaagaaagtgtgtagagacccctgggagtgaggggtaggggatacaatactctgaagcagaagaggacccttgcagtgatggttagggactcttctgagtaggagacgtaatcggcttttggtccatggaacttttaccacatgtattcagc

SEQ ID NO: 458 - DNA, 489 bp, homo sapiens
  misc_feature (363)..(365): n is a, c, g, or t
  misc_feature (367)..(371): n is a, c, g, or t
  misc_feature (373)..(375): n is a, c, g, or t
  misc_feature (377)..(378): n is a, c, g, or t
aaagcaaccgttatttagtatctgttattgctgagtacaatgtaatatagaacttgaacttgaattcaaacttacactcctccaaaacctgtattattttctccaggccctgccactagccagtgagggaaatagatgaaatagatctgactctaccttgaaggtctgcagcaggggtcagcaaacttctagccctcaggtcaatagcctgccgcctgtttttgtatggcccatgagctaagaatgatttgtacgtttttcaatgttttaaaaaattgaaaggagtataatgtttcataacacatggaaattatgtgcagctcaaatttcagtatccataaataaagttttattggaacacannnannnnnannnannagatattgtctatggctgtttttgtgcaaaatggcagagttgggttcagagttagcaacagagagcttgtagcctgcaagcctagagtatttactatctggatttctacaa

SEQ ID NO: 459 - DNA, 542 bp, homo sapiens
ctccagtcccaaactaatctgtcaggttcactggtacataaatacctaggaaatatttttccagtctacaatttggtgctattgtgcagtaactaatagtactcttaccagaggagaaattatattaacgaccctgctaatatcctttcttagttatttgctccttgcaaattaaaaaagcaactaagagaaagaaaaacattgtagatatctatttatatttaaagtttatgtttcatgaactgcagctgcaggattctggcattttgcatgccattctccatcagatctgggatgatggctcagaacatgtacacagactaagagtaactgtgtgatctgttaaggggtggataacataatatgcagcttaggatgctattttgagatgtatgatattcagttcattcacctgattactttggttgcagcacaactgtatatattgtataaccgaaattgattattttcattgtccttaatgcagtgatttataattagagcatgtttaataagtttactcttcttgttaactagtcatt

SEQ ID NO: 460 - DNA, 517 bp, homo sapiens
tccaggtgcccagctatacctgtgcctcggcttttctcagctggatgatggtcttcagcctctttctgtcccttctgtccctcacagcactagtatttcatgttgcacacccactcagctccgtgaacttgtgagaacacagccgattcacctgagcaggacctctgaaaccctggaccagtggtctcacatggtgctacgcctgcatgtaaacacgcctgcaaacgctgcctgccggtaaacacgcctgcaaacgctgcctgcccgtaaacacgcctgcaaacgctgcctgcccacacaggttcacgtgcagctcaaggaaaggcctgaaaggagcccttatctgtgctcaggactcagaagcctctgggtcagtggtccacatcccgggacgcagcaggaggccaggccggcgagccctgtggatgagccctcagaacccttggcttgcccacgtggaaaagggatagaggttgggtttccccccttttatagatggtcacgcacctgggtgtta

SEQ ID NO: 461 - DNA, 99 bp, homo sapiens
gggccagtgctgggaggattttgtgggccaggagctgtaccggttcctggtgatggacttcgtcctcatgttgctggacacgctttttggggaactggt

SEQ ID NO: 462 - DNA, 371 bp, homo sapiens
tattctgtcctgagaccacgggcaaagctcttccattttgagagagaagaaaaactgtttggaaccacaccaatgatatttttctttgtaatacttgaaatttatttttttattattttgatagcagatgtgctatttatttatttaatatatgtataaggagtcctaaacaatagaaagctgtagaagctgtagagataggcttcagttgttaattggtttggagcctcctatgtgtgacttatgactctctgtgttctgtgtatttgtctgaattaatgacctgggatataaagctatgctagctttcaaacaggagatgccttcagaaagctttgtatattttgcagttgccagaccaataaaatacc

SEQ ID NO: 463 - DNA, 511 bp, homo sapiens
gtctctggggacacgaggatgccctaatgatgctgacttgtcatggttgcagcatttgaacttttggtgttaaaaaaaaaaacctgtaagtctgtaacctggcaacattttacaaccctgtatttttaaagatggctttctaataaaaaatccagaaccacacagccctatggtcaaacaatcctacgtttgtgcctctgcttttaaaggtgctgtgctggacagttggcatgccagggttcgagaagagtgaatggcttgacgtccttgcagttaactgtgcaaaattggctggctgcctctgttcctactgtactgtaactttgatcatgtctgttcctattccattctcccaggagcttctctgcagactgacacaccctcccccaccccgggtagtggagatgctggtgtctgggtagtcatggatttctgctgacatttgaatgtgataaacaatccagcattacttaggaaatgctacatgcggaatgtgcacgtttccaggggc

SEQ ID NO: 464 - DNA, 399 bp, homo sapiens
  misc_feature (316)..(316): n is a, c, g, or t
aggactatagctgtgtccatctcccagaagctcctcatcaatcaccatctggccgagaacttgcttcaaatactggaaatcagcgtagtcgccagaggcacccagcatggtactgttgttgactcgcataatgcgagagatgttgcggaaacgagccaaggagccgtaggatcccagcatgtctgcggcaatcaccactccgccctcgaacttaacgccgaggactgaggtcccggtcaccatggggttctgggtccgcgtgattggacctctgtaaagtgcagacgccggatccatgaaggaatcgggagtgganggaatgcggtaaaactgtcctggggccggaccccccgcccaaagtccggaccgcgaccccaaaaacgcttccatcttagtcac

SEQ ID NO: 465 - DNA, 200 bp, homo sapiens
tggatagctcaagtctctgccatttgtaatttttggctctaagctccgattggagacgcttctccttgtgcatgtgagttgactgatgttgtgagtgtaaatgcatttggttatttctggtatcggtggccacttggatggatttttttacattctgttccccagttacaggaaggagtccctttggtgtgtgaatatgt

SEQ ID NO: 466 - DNA, 446 bp, homo sapiens
gccaagcggaccagagctgtgcagcccctcaggctacctagcaacaaggcccaggtgaagccagggcagacatgcagtgtggccggctgggggcagacggcccccctgggaaaacattcacacacactacaagaggtgaagatgacagtgcaggaagatcgaaagtgcgaatctgacttacgccattattacgacagtaccattgagttgtgcgtgggggacccagagattaaaaagacttcctttaagggggactctggaggccctcttgtgtgtaacaaggtggcccagggcattgtctcctatggacgaaacaatggcatgcctccacgagcctgcaccaaagtctcaagctttgtacactggataaagaaaaccatgaaacgctactaactacaggaagcaaactaagcccccgctgtaatgaaacaccttctctggagcca

SEQ ID NO: 467 - DNA, 527 bp, homo sapiens
attgcacgaacctgggaggcaaccagctctgctcacgtgagctgagctcacgccactgcactccagcctgggcaacagagcgagactaagtctcaaaaagaaaaaaaaaaaagaaaaataccagaggttgaagtcctcccatccccctttcttacaggaagtaactgtcgagaaattgtgtgtctgacaacccctgttgtcctctcagtcaagcagtgtgtgccgtagtttcagatgtttgaccctttatgcagatgacgacatagtgtgcgttttgttccaagcttttttctcttactcgacgttattttttttaggtctagatggtccaactaaatctcattgagttctgtaagcagctggttacctccatttccacactttccatttaggaagctaaggcttaaaaagatgaagcccctgccaggcatggtggctcatgtctgtaatccctttgagaggctgagctgggaggatcgcttgaatctaagagtgtgagaccagcctggacagcctagcaagaaccc

SEQ ID NO: 468 - DNA, 399 bp, homo sapiens
  misc_feature (73)..(73): n is a, c, g, or t
  misc_feature (117)..(117): n is a, c, g, or t
ttttcaatctgaagttctgcgaacaaaaagaaaaaggtcatatgctcctttccccacagcaaccaatgtaaancagcaggggcagggagataactgctatagacactcctgttccancaggtggaaaccaaggtgcacagaagtcactggttcatagcaattctgaaatccatttgagtacaggtttgcagttctacactcaaagcctgggaataactccctatggcttttggttccaccttctgggctcttggttttatcctctaagtcatccttttttgtgtgaaagggagatgtgtttggacctaaatagttttcttagcctgcttcctgtttgtagaaatgcgtttgtagaaagggtccaaaggcccctttcctttttgtactctttttcagctc

SEQ ID NO: 469 - DNA, 461 bp, homo sapiens
ggtttgaataattgcagggccagcctgccatgatctttctcacttactcctctcccattcagcaatcaaccagactaaggagttttgatccctagtgattacagccctgaagaaaattaaatctgaattaattttacatggccttcgtgatctttctgctgttcttactttttcgaatgtagttggggggtgggagggacaggttatggtatttaaagagaataaacattttgcacatacatgtattgtacaacagtaagatcctctgttaaaaccagctgtcctgttctccatctccatttcttcccatgctgtaaccccaggctccaccagctgttccccagtgatgttacctagcttccctctaccgttgtctactgaccatttccactacatgcctttcctaccttcccttcacaaccaatcaagtgaatacttgattattatctcttccttactgt

SEQ ID NO: 470 - DNA, 256 bp, homo sapiens
gggaagagagtttgcaggcctgtgcttcaaagaactcttctagtctgctttctatagataatgaagaagaaatgaaatttctggccagcattttaccttcctcatggattggtgtgtttcgtaacagcagtcatcatccatgggtgacaataaatggtttggctttcaaacatgagataaaagactcagatcatgctgaacgtaactgtgcaatgctacatgtacgtggacttatatcagaccagtgtggatcttc

SEQ ID NO: 471 - DNA, 410 bp, homo sapiens
aagcacatgctaaacgtcttccatttgacttctctactcggtgtctcagacagtgtcttcccagaaaaccaccaccctctacccaaagatgaaacatgctcatgtcatttttctcatggtcacatttaacagttttgacatgttatacttgcgcatagatccaagcgtttcttgggaacctgacttttgagtgtttaataaagccggaagtggtgttgccctgaaccagcagattttcacctgggttctggctccggtgtttaacactggatacatctttgatgtgcgaaagtgagttcatcttcagacacatttggtacatccagaaatagatccaagaaatggggtggttgagtgggtccgcacgaaatgcttgattatgtcagcaacacccaacactgtctgttttc

SEQ ID NO: 472 - DNA, 527 bp, homo sapiens
  misc_feature (292)..(292): n is a, c, g, or t
gaaagctgacagtctgttctttgtaaactgcctttccctgtttttctgttttgttttgtttctcaagtttcattttttactaagccccttctgacacctaggcagataaagataagagtagtgcgcagtacaaatgtcagctctgaagaggaggaagtaaatcttcaatgctagggcagatcttcactatccgtgatccagtcttaatttgagcatgagagcaaaatttagtcatctacacaagaagcaaaagcaaggaatagttgttgggtttttgttttttggttgttgnttttttttttttttaggcaagaagtgttgccggtagggtatgtgtgctttctttgccttcctatttcctttcaaagaaatctcttgtaaattacaaaactgtgaattgggttgccaaaaactgttgcccttcgttagatgcttcaaacagtgtaaatcctatactgcaccctgtccacctctgctccctcctccctcccctgagagtgaggacctcatccgaccatgtaattacc

SEQ ID NO: 473 - DNA, 516 bp, homo sapiens
caggaggccctgcaactagaggtgaaagctcggcgagatgaagaatctgtgcgaatcgctcagaccagactgctggaagaggaggaagagaagctgaagcagttgatgcagctgaaggaggagcaggagcgctacatcgaacgggcgcagcaggagaaggaagagctgcagcaggagatggcacagcagagccgctccctgcagcaggcccagcagcagctggaggaggtgcggcagaaccggcagagggctgacgaggatgtggaggctgcccagagaaaactgcgccaggccagcaccaacgtgaaacactggaatgtccagatgaaccggctgatgcatccaattgagcctggagataagcgtccggtcaccagcagctccttctcaggcttccagccccctctgcttgcccaccgtgactcctccctaaagcgcctgacccgctggggatcccagggcaacaggaccccctcgcccaacagcaatgagcagcagaagtccctcaatggtggg

SEQ ID NO: 474 - DNA, 474 bp, homo sapiens
  misc_feature (155)..(155): n is a, c, g, or t
  misc_feature (165)..(165): n is a, c, g, or t
  misc_feature (170)..(171): n is a, c, g, or t
  misc_feature (177)..(177): n is a, c, g, or t
  misc_feature (184)..(184): n is a, c, g, or t
  misc_feature (187)..(187): n is a, c, g, or t
  misc_feature (193)..(194): n is a, c, g, or t
  misc_feature (203)..(203): n is a, c, g, or t
  misc_feature (208)..(208): n is a, c, g, or t
  misc_feature (212)..(212): n is a, c, g, or t
  misc_feature (221)..(221): n is a, c, g, or t
  misc_feature (230)..(232): n is a, c, g, or t
  misc_feature (236)..(236): n is a, c, g, or t
  misc_feature (242)..(242): n is a, c, g, or t
  misc_feature (254)..(254): n is a, c, g, or t
  misc_feature (263)..(263): n is a, c, g, or t
  misc_feature (275)..(275): n is a, c, g, or t
  misc_feature (284)..(284): n is a, c, g, or t
gacatggcaattcttaaattgattcagaatggtctgatactattccagtatcacctccttaattctgtttctcctcgttttcctgattttccttctcattctctccttccccgctctgtctctctctccctgtcactctctctctctcgttcctntattttttgntttcnnttaccntcttacntgntttaanncctgttgcnttccnttcntggattaantacatttannngccnattccntttatatggtcnacatttccntatgactttacntcaattacnttttaaaatcctttctattctgagactaatttttaagaattacaaagctcattcttctgaatctaatatcactaactcctagactttttccgttttctttggatacactttaagtaggaatttatcagaattttcattcaactcgttctttaatgcagatatttactagttataagaccttaaggctggg

SEQ ID NO: 475 - DNA, 196 bp, homo sapiens
ttttcataactgagcccactcgcaagttggagccatcagtgggatacgccacattttggaagccccagcatcgtgtacttaccagtgtgttcacaaaatgaaatttgtgtgagagctgtacattaaaaaaaacatcattattattattatttgcagtcatggagaaccacctacccctgacttctgtttagtctcc

SEQ ID NO: 476 - DNA, 354 bp, homo sapiens
gaatgtgagagcctgggtgtctgagaccgggagggcccagcagtgaggggcaggctcttctggtcaccaggctgttcagtggactcagttcttcatcttgtaatgtcgatggctttgccacaccaggccaagcccatgccataccttgtcaagactgtcaaagtggttgtggttaggtcaaactggttttggttctgatggttaggaagaaacaggtcagccctcagatcacctggcccgggacagctgaccccctagaaccctggctctgccattagctaggacctaagactctgcccacattttggtctgttctctcccattacacataggtttgtctcagcatgcaagagt

SEQ ID NO: 477 - DNA, 416 bp, homo sapiens
gggctttcctctgctctctcaaaggccccggtgggtttgtctgcacttggtgctcctgcccacaccagccactttggtgacaatgacccttccaagaatctttggttcaaggagcaccagttccctcttcattcttgaagcagggagaaattgacctttgccttgtcgcccaggaagtggggctcggcacccataactaacacctcccacccttggaaaccatgtcttctgggggtgagatgaccattctgggtctaagactgtttcaaagaagagctcatagactgactggtccagaagacagagggtacaacagtggcatcacagtgacagtgtcatggggagctgggcgggcccagccaaaccctccttcttcctagagcccagccagcaggcaggagttcctggaccctcag

SEQ ID NO: 478 - DNA, 300 bp, homo sapiens
gaaatatctttgctcccagtttcttgagatctgctgacagatgttccatcctgtacaagtgctcagttccaatgtgcccagtcatgacatttctcaaagtttttacagtgtatctcgaagtcttccatcagcagtgattgaagtatctgtacctgcccccactcagcatttcggtgcttccctttcactgaagtgaatacatggtagcagggtctttgtgtgctgtggattttgtggcttcaatctacgatgttaaaacaaattaaaaacacctaagtgactaccacttatttctaaatc

SEQ ID NO: 479 - DNA, 427 bp, homo sapiens
gttttgctaactggctatctggaatacctgatcaagcataactatggcaaagataaagcagcaaccaagaaaccagttgtgaacataattactccgtctcatgtagaggagcgggggtgccagctaacaataacattttctgttccaaacgaagatgttttccaagaactagaaaaaagaggagtggtttgtgacaagcggaatccaaatggcattcgagtggctccagttcctctctataattctttccatgatgtttataaatttaccaatctgctcacttctatacttgactctgcagaaacaaaaaattagcagtgttttctagaacaacttaagcaaattatactgaaagctgctgtggttatttcagtattattcgatttttaattattgaaagtatgtcaccattgaccacatgtaacta

SEQ ID NO: 480 - DNA, 486 bp, homo sapiens
ggcaacattccaagaatagcatctgtacaaaggggaaagaacataaaggtaaaacaaaacaaaacaacattttgagaacaaagatgaccataaccactgaagggaatcacatcttttaagacaaattcatattcttttatttgttatggcagatgacaagatggtacaacctttattcttttccaaaataaaacaaagggcacagcatctgtagtcagccgacaactctttcggccttttgggggtgggtctggccgtacttgtgatttcgatggtacgtgaccctctgctgaagacttgccccctgcccgtgtacatagtgcattgtttctgtgggcgggcccagcactttccgtcaacgttgtactgtatgtgatgaattgcgttggtctctgcatttttctgcagaagaggagtaaccgctccaggtaccttgacctttgtacagcccagaggccaacactgtgggtgtgtgactctttagca

SEQ ID NO: 481 - DNA, 469 bp, homo sapiens
acagaaggaccagcccttgagggagaacttatggccacagcccatccatagtaactgacatgattagcagaagaaaggaacatttaggggcaagcaggcgctgtgctatcatgatggaatttcatatctacagatagagagttgttgtgtacagacttgttgtgactttgacgcttgcgaactagagatgtgcaattgatttcttttcttcctggctttttaactcccctgtttcaatcactgtcctccacacaagggaaggacagaaaggagagtggccattctttttttcttggcccccttcccaaggccttaagctttggacccaagggaaaactgcatggagacgcatttcggttgagaatggaaaccacaacttttaaccaaacaattatttaaagcaatgctgatgaatcactgtttttagacaccttcattttgaggggaggagttccacagattgtttcta

SEQ ID NO: 482 - DNA, 542 bp, homo sapiens
actcccaagagcaaatccacattcctcttgagttctgcagcttctgtgtaaatagggcagctgtcgtctatgccgtagaatcacatgatctgaggaccattcatggaagctgctaaatagcctagtctggggagtcttccataaagttttgcatggagcaaacaaacaggattaaactaggtttggttccttcagccctctaaaagcatagggcttagcctgcaggcttccttgggctttctctgtgtgtgtagttttgtaaacactatagcatctgttaagatccagtgtccatggaaacattcccacatgccgtgactctggactatatcagtttttggaaagcagggttcctctgcctgctaacaagcccacgtggaccagtctgaatgtctttcctttacacctatgtttttaagtagtcaaacttcaagaaacaatctaaacaagtttctgttgcatatgtgtttgtgaacttgtatttgtatttagtaggcttctatattgcatttaacttgtttttgtaactcctgattcttcct

SEQ ID NO: 483 - DNA, 521 bp, homo sapiens
tatgagtcaggctctgtttattgtttcaattctttacaccaaagtatgaactggagagggtacctcagttataaggagtctgagaatattggccctttctaacctatgtgcataattaaaaccagcttcatttgttgctccgagagtgtttctccaaggttttctatcttcaaaaccaactaagttatgaaagtagagagatctgccctgtgttatccagttatgagataaaaaatgaatataagagtgcttgtcattataaaagtttcctttttatctctcaagccaccagctgccagccaccacgagccagctgccagcctagctttttttttttttttttttttagcacttagtatttagcatttattaacaggtactctaagaatgatgaagcattgtttttaatcttaagactatgaaggtttttcttagttcttctgcttttgcaattgtgtttgtgaaatttgaatacttgcaggctttgtatgtgaataattctagcgggggacctgggagat

SEQ ID NO: 484 - DNA, 523 bp, homo sapiens
  misc_feature (240)..(240): n is a, c, g, or t
gtcacacgggttagagggtcactgggaaacaccgggcggtggcttctgtgatttattttcttgatggtaacttctcagagcagggcgattgggacatcaccagccagagcacaggaagccaccctgcctgctggggaggagggacccacacaagccccctcggcagtttgtccccccagcttcggtatgccttcagggaaaggtcacagctggggaggaagcggggggacgcctgtcacncctggcaggtggtgagttcaggtgggggctccctgctgcccccaggcctgggagcttgaagccctcccggcatctggcatccgagcctcccgccctccagggtgcgcttccctctcttgccgcagcatacacgagggcaggcagtggccttgtcactgtatcttgcatcagagacaaaggaggacccgctttagccctgctgcgggaaatgggggagggcccagggccagcgcattgtgcactggtttactttaaaatgtacagattcttctcgttaaattct

SEQ ID NO: 485 - DNA, 447 bp, homo sapiens
ccagctgttgctggtttgtcatgcctccggcttctacccaaagcctgtttgggtgacatggatgcggaatgaacaggagcaactgggcactaaacatggtgatattcttcctaatgctgatgggacatggtatcttcaggtgatcctggaggtggcatctgaggagcctgctggcctgtcttgtcgagtgagacacagcagtctaggaggccaggacatcatcctctactggggacaccactcttccatgaattggattgccttggtagtgatagtgcccttggtgattctaatagtccttgtgttatggtttaagaagcactgctcatatcaggacatcctgtgagactcttccccctgactcccccattgtgttaagaacccagcaacccaggagcctagtacaatatagtgatgccatcccgtcgactctccatttaaattgtt

SEQ ID NO: 486 - DNA, 436 bp, homo sapiens
  misc_feature (199)..(199): n is a, c, g, or t
cagcccttgcattgcagaggggcccatgaaagaggacaggctacccctttacaaatagaatttgagcatcagtgaggttaaactaaggccctcttgaatctctgaatttgagatacaaacatgttcctgggatcactgatgactttttatactttgtaaagacaattgttggagagcccctcacacagccctggcctcngctcaactagcagatacagggatgaggcagacctgactctcttaaggaggctgagagcccaaactgctgtcccaaacatgcacttccttgcttaaggtatggtacaagcaatgcctgcccattggagagaaaaaacttaagtagataaggaaataagaaccactcataattcttcaccttaggaataatctcctgttaatatggtgtacattcttcctgattattttctacacatac

SEQ ID NO: 487 - DNA, 54 bp, homo sapiens
gatggatatactcaattacacttcgactctcaaagcaataccaggatagctgtt

SEQ ID NO: 488 - DNA, 168 bp, homo sapiens
ggcatcatgttgaccgagctggagaaagccttgaactctatcatcgacgtctaccacaagtactccctgataaaggggaatttccatgccgtctacagggatgacctgaagaaattgctagagaccgagtgtcctcagtatatcaggaaaaagggtgcagacgtctgg

SEQ ID NO: 489 - DNA, 525 bp, homo sapiens
  misc_feature (319)..(319): n is a, c, g, or t
tagggactccaaaggcagctgacagcatctggctttcagttcctcagtcaccactactttgtaccaaattcactgttttggctctgaaatctaattttgagtttagcaaggatgtctgcattgctcatgcaaatgaactaagcgttcattggaatgacaccatcaccacccaaatgaaaagaactggctggaatattcatcagcctactaatgtcatctcccaacccactctccaaactccatcccaaaaaagcatccagttcagaattgcccactgttggcaaagaaagaatgtcactaatttatttacagggagcanatagcagggacttacagatgaaccaggccctgcgatttttggaaaatgagcaccaggaactgcaggccaagattgaatgcctgcaaggggacagagacctgtgcatcttggatacccaggacctacaagatcaactaaaaaggtcagaggctgagaaacctaccctggtgaccaaataacagaattggcaggttttgcttcaaaat

SEQ ID NO: 490 - DNA, 355 bp, homo sapiens
ccggcccactctgaagtaatcttaagaagacgttaactcatttttcttgtgtattgtagacacttttggctgtctggtaacatggaaaatctcagaatgatgttttaagtatataaaatgccaaacaaagttaaattacagttatcaaagtatttttaaaacttcatagtgataaatgagactatatagttatattgttaatatagttaacacattacatgatttggtgagcctaattgctgttactaattagaggagtaaaaatgtttcacgataactcagcaattgtaatgagaaatgaaacatctaatgtcttttgggttacaaagtaacaggtactgagatttgtggccta

SEQ ID NO: 491 - DNA, 370 bp, homo sapiens
ggacctcagccatgagacttctcatcctggccctccttggcatctgctctctcactgcatacattgtggaaggtgtagggagtgaagtctcacataggaggacctgtgtgagcctcactacccagcgactgccagttagcagaatcaagacctacaccatcacggaaggctccttgagagcagtaatttttattaccaaacgtggcctaaaagtctgtgctgatccacaagccacgtgggtgagagacgtggtcaggagcatggacaggaaatccaacaccagaaataacatgatccagaccaagccaacaggaacccagcaatcgaccaatacagctgtgaccctgactggctagtagtctctggcacc

SEQ ID NO: 492 - DNA, 505 bp, homo sapiens
gcatggggagcctgacgttttgaaggatgagcttcaactctatggagatgctcctggagaggtggtaccctctggggaatcaggactccgaaggagaggctctgacccagcaagtggagaagtggaggcctctcagttaagaagactgaatataaagaaagatgatgagtttttccatttcgtcctcctgtgctttgccatcggggccttgctggtgtgttatcactattacgcagactggttcatgtctcttggggtcggcctgctcaccttcgcctccctggaaaccgttggcatctacttcggactagtgtaccgtatccacagcgtcctccaaggcttcatccccctcttccagaagtttaggctgacagggttcaggaagactgactgaggccacttccaggtgggcagcagaggcaggccccagtgtgaccaccactgcgacccctgagcccacaagggcagagcagcattctgagagacgcacaggagaccaagccag

SEQ ID NO: 493 - DNA, 536 bp, homo sapiens
aatgctgaactccttgttagcccttcagattgttaggagtggttctcatttggtctgccagaatactgggttcttagttgacaacctagaatgtcagatttctggttgatttgtaacacagtcattctaggatgtggagctactgatgaaatctgctagaaagttagggggttcttattttgcattccagaatcttgactttctgattggtgattcaaagtgttgtgttccctggctgatgatccagaacagtggctcgtatcccaaatctgtcagcatctggctgtctagaatgtggatttgattcattttcctgttcagtgagatatcatagagacggagatcctaaggtccaacaagaatgcattccctgaatctgtgcctgcactgagagggcaaggaagtggggtgttcttcttgggacccccactaagaccctggtctgaggatgtagagagaacaggtgggctgtattcacgccattggttggaagctaccagagctctatccccatccaggtcttgactcatggcagc

SEQ ID NO: 494 - DNA, 480 bp, homo sapiens
gcaccagatgcaacctcactatggtatgctggccagcaccctctcctgggggtggcaggcacacagcagccccccagcactaaggccgtgtctctgaggacgtcatcggaggctgggcccctgggatgggaccagggatgggggatgggccagggtttacccagtgggacagaggagcaaggtttaaatttgttattgtgtattatgttgttcaaatgcattttgggggtttttaatctttgtgacaggaaagccctcccccttccccttctgtgtcacagttcttggtgactgtcccaccggagcctccccctcagatgatctctccacggtagcacttgaccttttcgacgcttaacctttccgctgtcgccccaggccctccctgactccctgtgggggtggccatccctgggcccctccacgcctcctggccagacgctgccgctgccgctgcaccacggcgtttttttacaacat

SEQ ID NO: 495 - DNA, 401 bp, homo sapiens
gaaagggtaccggcatgacagctcaacagcagtggccggcagcccccgaggccatgggcagagccgcgagacaacccaggaacgcaggaagaaggaagccaacaaggcgacaagagccaaccacaaccggagaaccatggccgaccgcaagaggagcaaaggcatgatcccatcctgagacctggtgcagggccagtggggaggcagcggcaccagactcaccaggccgtgctcccatcgcctggggcctcctcactaggggccccaagttcaactcaacccctcaacagcctcagctttgcagcccctgagaaggccgcctctcatctaccagccagccatgagcgccttcctgcagaacacacagtgccttatgccacagccgaagaatccgtggggcc

SEQ ID NO: 496 - DNA, 346 bp, homo sapiens
gtgcataagcaagcctggttggaagcattctggagtgctctgtctgccctggtgggtttcattatcctgtctgtcaaacaggccaccttaaatcctgcctcactgcagtgtgagttggacaaaaataatataccaacaagaagttatgtttcttacttttatcatgattcactttataccacggactgctatacagccaaagccagtctggctggaactctctctctgatgctgatttgcactctgctggaattctgcctagctgtgctcactgctgtgctgcggtggaaacaggcttactctgacttccctgggagtgtacttttcctgcctcacagttacattg

SEQ ID NO: 497 - DNA, 208 bp, homo sapiens
  misc_feature (81)..(81): n is a, c, g, or t
atacttgttctgataaggttcaatcttatgatccagaaaccaattcttggctacttcgtgcagctatcccaattgccaaanaggtgtataacagctgtatccctaaacaacctgatctatgttgccggtggactgaccaaggcaatatactgttacgatccagttgaagattactggatgcacgtacagaatacattcagccgtcagg

SEQ ID NO: 498 - DNA, 524 bp, homo sapiens
atgatgccgggcgggacggcttcatcgacctgatggagctaaaactcatgatggagaaacttggggcccctcagacccacctgggcctgaaaaacatgatcaaggaggtggatgaggactttgacagcaagctgagcttccgggagttcctcctgatcttccgcaaggcggcggccggggagcttcaggaggacagcgggctgtgcgtgctggcccgcctctctgagatcgacgtctccagtgagggtgtcaagggggccaagagcttctttgaggccaaggtccaggccatcaacgtgtccagccgcttcgaggaggagatcaaggcagagcaggaggaaaggaagaagcaggcggaggagatgaagcagcggaaagcggccttcaaggagctgcagtccacctttaagtagcgggggctgcagccgaccgccctgctccggccccagtgtggtgggcgagggtggcgcatgggaggccgagcctgaatccttgcctgtgtctgacgggaccactactaaaaa

SEQ ID NO: 499 - DNA, 530 bp, homo sapiens
gggagaagatcccggacatggccccgccccagcaagccaagcccaagctcatccccgcgtctgcctcagcggcaggccagtgaaggcgttttcctagcctggagatgggaaaatatgcttggcagagacaggaatgctgtgtgcttgttccaaatgagcagctggcatccgagtggtgtcctgtgtgggctgatagttgatcacacattgtgcttttgatttttgcatttggtgatgaatattttatacccgtctaagggagaaagctaatgttttccacaagactgaacaacgtgtatttacacgagggtagacggcagatgcctgacagagagtgggttggcagacaacacactagcattttcacgggtgtgggcacatgggtgtggcacctggacgtgtgcagcatgtggcggtctctgtgtgaagccaccgtgcttctctttggggggccgcgagatctagcatctctgaaatcctggctgtcgaggctttgaagcatgtgttacctggttaagcttgttttctct

SEQ ID NO: 500 - DNA, 457 bp, homo sapiens
tcaaggcgctgttggaggctgggtgtgacagcacagagccaggttgtcttgtggaaaccacagccacgggtttgccactggctcagcatggcctcactgccagtcccagcctggctgagggacaagatggtttctcttgggagttcctgagtggagcacccttccaggctttttgaaagccagctgatctgtggagccttgttaagggactcaatacggtgtttggatattgatgtttttccttgagactgtcttgtccatcaataaagatggaggatgtctcctctttgaaccccgcttccccaccagtactctctctcccttagagtttatgagttattcaaggaggagacttcttaaagacagcaacgcaattcttgtaacttgtgtaaatagccccatctttcagagtgataccatttctacatttgataatgcctgtattcctgtaggatgt

SEQ ID NO: 501 - DNA, 526 bp, homo sapiens
  misc_feature (61)..(65): n is a, c, g, or t
  misc_feature (67)..(69): n is a, c, g, or t
  misc_feature (202)..(202): n is a, c, g, or t
cagactcaacagattcaagtactctgcttactctaattgactagactctaggttttatttnnnnncnnngcattacataaatcactctgataacataagtgcacagtaatatgcctgatctcttcctttttaaaagccaacttgagttcagtaccatctgaatacacacacatgcacatatacccacacacgcatacacacntactcctgtggcaaacataataatgtatttatttagaattataatatgaccatcatgttaattattttttacctaatcagagttgttattgacaaatgtcataagtggaaagtattaattcttattgtcatcagtatttagccattatttagtagctcaagaatatctttatgtgaatgtctctgtaacttggaattgcaatttcactgtgttaagtaatcagaactctgcttataagatttatctgtatcttgtttcataatttaataatgaaactaaattcaagttaatgtaatgttgatctccgtcgaaaaataacttgtg

SEQ ID NO: 502 - DNA, 494 bp, homo sapiens
ggaacagttagttctcatctagaatgaaagttccatatatgcattggtgaatatatatgtatacacatacttacatacttatatgggtatctgtatagataatttgtattagagtattatatagcttcttagtagggtctcaagtaagttcattttttttatctgggctatatacagtcctcaaataaataatgtcttgattttatttcagcaggaataattttatttattttgcctatttataattaaagtatttttctttagtttgaaatgtgtattaaagttacatttttgagttacaagagtcttataactacttgaatttttagttaaaatgtcttaatgtaggttgtagtcactttagatggaaaattacctcacatctgttttcttcagtattacttaagattgtttatttagtggtagagagattttttttttcagcctagaggcagctattttaccatctggtatttatggtctaatttgtattt

SEQ ID NO: 503 - DNA, 491 bp, homo sapiens
gatcgagcgccgaggcatggaggaggtgggcatctaccgcgtgtccggtgtggccacggacatccaggcactgaaggcagccttcgacgtcaataacaaggacgtgtcggtgatgatgagcgagatggacgtgaacgccatcgcaggcacgctgaagctgtacttccgtgagctgcccgagcccctcttcactgacgagttctaccccaacttcgcagagggcatcgctctttcagacccggttgcaaaggagagctgcatgctcaacctgctgctgtccctgccggaggccaacctgctcaccttccttttccttctggaccacctgaaaagggtggcagagaaggaggcagtcaataagatgtccctgcacaacctcgccacggtctttggccccacgctgctccggccctccgagaaggagagcaagctccctgccaaccccagccagcctatcaccatgactgacagctggtccttggaggtcatgt

SEQ ID NO: 504 - DNA, 288 bp, homo sapiens
gcccggcctcagacaaagggtccggcggggccgaagtcgcgccgacctcgagtccccgcagaggaagcacaagtgccactacgcgggctgcgagaaagtttacgggaaatcttcgcacctcaaggcgcacctgagaactcacacaggtgagaggcccttcgcctgcagctggcaggactgcaacaagaagttcgcgcgctccgacgagctggcgcggcactaccgcacacacacgggcgagaagaagttcagctgccccatctgcgagaagcgcttcatgcgcagcga

SEQ ID NO: 505 - DNA, 237 bp, homo sapiens
  misc_feature (87)..(88): n is a, c, g, or t
  misc_feature (90)..(94): n is a, c, g, or t
  misc_feature (96)..(105): n is a, c, g, or t
  misc_feature (107)..(111): n is a, c, g, or t
  misc_feature (113)..(114): n is a, c, g, or t
gacatggttcaagtgaggactacctacacatggtgcacaggctaagtagtgacgatggagattcttcaacaatgaggaatgctgcanntnnnnncnnnnnnnnnncnnnnncnntatgctcccctgctggaagtgaaggaactcctaaaggctcaagaccacctttaatcctacaatctcagtctctaccttgttcatcacctcgagatgttccaccagatatcttgctagattctc

SEQ ID NO: 506 - DNA, 456 bp, homo sapiens
gccaaactgatcatccagcagtgtcagcagcttcattgtctccgagtcctctcatttttcaagactttgaatgatgacagcgtggtggaaattgccaaagtagcaatcagtggaggtttccagaaacttgagaacctaaagctttcaatcaatcacaagattacagaggaaggatacagaaatttctttcaagcactggacaacatgccaaacttgcaggagttggacatctccaggcatttcacagagtgtatcaaagctcaggccacaacagtcaagtctttgagtcaatgtgtgttacgactaccaaggctcattagactgaacatgttaagttggctcttggatgcagatgatattgcattgcttaatgtcatgaaagaaagacatcctcaatctaagtacttaactattctccagaaatggatactgccgttctctccaatcattcagaaa

SEQ ID NO: 507 - DNA, 446 bp, homo sapiens
ggggttcgagcctcgttaagcacgagaggatacatacgggcgagaagccgtacaagtgcacagaatgtgggaaggccttcaattgtggctatcacctcactcagcacgagagaatccacacaggcgaaaccccgtataaatgtaaggagtgtgggaaggctttcatttatggatcgagcctcgtgaaacatgagagaattcataccggggtgaaaccctatgggtgtacagaatgtgggaagagctttagtcacggccatcagcttacacaacatcagaaaacgcacagtggggcgaaatcctacgaatgtaaggagtgcgggaaggcatgtaaccacctaaaccatctccgagaacatcagaggatccacaacagttgaagagccttttgaacgcagtagcccgctcgtatctatggtttcgctttccacagtttgttacctgca

SEQ ID NO: 508 - DNA, 543 bp, homo sapiens
atcgtggagatcatgcagcaaggttctcagcttccttgcttccatggctccagcaccattcgaaacctcaaagagaggttccacatgagcatgactgaggagcagctgcagctgctggtggagcagatggtggatggcagtatgcggtctatcaccaccaaactctatgacggcttccagtacctcaccaacggcatcatgtgacacgctcctcagcccaggagtggtggggggtccagggcaccctccctagagggcccttgtttgagaaaccccaaaccaggaaaccccacctacccaaccatccacccaagggaaatggaaggcaagaaacacgaaggatcatgtggtaactgcgagagcttgctgaggggtgggagagccagctgtggggtccagacttgttggggcttccctgcccctcctggtctgtgtcagtattaccaccagactgactccaggactcactgccctccagaaaacagaggtgacaaatgtgagggacactggggcctttcttctccttgtaggggtctctcagag

SEQ ID NO: 509 - DNA, 186 bp, homo sapiens
  misc_feature (73)..(73): n is a, c, g, or t
gattcaggctcagtgtatgcccacagttctttggcaaaccccaccactgggccagccaactacacggggattntgatcgggtcctgatgggtgcccatgatgggctgtgcaaaagtggtggtgagatttctccaccttcacggaggtggtacccaggggaggtggacttcagcagcgagaatgggc

SEQ ID NO: 510 - DNA, 392 bp, homo sapiens
ggagctgtcaccatgacgggggaacttgaggttaagaacatggacatgaagccggggtcaaccctgaagatcacaggcagcatcgccgatggcactgatggctttgtaattaatctgggccaggggacagacaagctgaacctgcatttcaaccctcgcttcagcgaatccaccattgtctgcaactcattggacggcagcaactgggggcaagaacaacgggaagatcacctgtgcttcagcccagggtcagaggtcaagttcacagtgacctttgagagtgacaaattcaaggtgaagctgccagatgggcacgagctgacttttcccaacaggctgggtcacagccacctgagctacctgagcgtaaggggcgggttcaacatgtcctc

SEQ ID NO: 511 - DNA, 261 bp, homo sapiens
gctctatttccaggcatgtgatcgcccccgctctccagattccccagcactctgctgcgtgtaactccactcaattctccactcatccttccttgtgaagcaggatcgttgaagttttaagtatgggcaaaaatctggaaaacttaggatccctctgacaccccaggattaggggacacagcagtggctagggcatcagccacagaactgagcgggaaatgccacttgtattggctgtaaagaaatcctggctttgggcca

SEQ ID NO: 512 - DNA, 492 bp, homo sapiens
tgtatggttttcacctggacaccgtgtagaatgcttgattacttgtactcttcttatgctaatatgctctgggctggagaaatgaaatcctcaagccatcaggatttgctatttaagtggcttgacaactgggccaccaaagaacttgaacttcaccttttaggatttgagctgttctggaacacattgctgcactttggaaagtcaaaatcaagtgccagtggcgccctttccatagagaatttgcccagctttgctttaaaagatgtcttgttttttatatacacataatcaataggtccaatctgctctcaaggccttggtcctggtgggattccttcaccaattactttaattaaaaatggctgcaactgtaagaacccttgtctgatatatttgcaactatgctcccatttacaaatgtaccttctaatgctcagttgccaggttccaatgcaaaggtggcgtggactccctttgtgtgggtggggt

SEQ ID NO: 513 - DNA, 495 bp, homo sapiens
gtatttcattctcgtatggtgctagagttagattaatctgcattttaaaaaactgaattggaatagaattggtaagttgcaaagactttttgaaaataattaaattatcatatcttccattcctgttattggagatgaaaataaaaagcaacttatgaaagtagacattcagatccagccattactaacctattccttttttggggaaatctgagcctagctcagaaaaacataaagcaccttgaaaaagacttggcagcttcctgataaagcgtgctgtgctgtgcagtaggaacacatcctatttattgtgatgttgtggttttattatcttaaactctgttccatacacttgtataaatacatggatatttttatgtacagaagtatgtctcttaaccagttcacttattgtactctggcaatttaaaagaaaatcagtaaaatattttgcttgtaaaatgcttaatatcgtgcctaggttatgtggtgact

SEQ ID NO: 514 - DNA, 523 bp, homo sapiens
atgtccatcgttgctgtcagttatgggcttattgccaccaagatccacaagcaaggcttgattaagtccagtcgtcccttacgggtcctctcctttgtcgcagcagccttttttctctgctggtccccatatcaggtggtggcccttatagccacagtcagaatccgtgagttattgcaaggcatgtacaaagaaattggtattgcagtggatgtgacaagtgccctggccttcttcaacagctgcctcaaccccatgctctatgtcttcatgggccaggacttccgggagaggctgatccacgcccttcccgccagtctggagagggccctgaccgaggactcaacccaaaccagtgacacagctaccaattctactttaccttctgcagaggtggagttacaggcaaagtgaggagggagctgggggacactttcgagctcccagctccagcttcgtctcaccttgagttaggctgagcacaggcatttcctgcttattttaggattacccactcatcaga

SEQ ID NO: 515 - DNA, 113 bp, homo sapiens
  misc_feature (69)..(69): n is a, c, g, or t
cctgtcccagaaacatcgaatgaatgctgaaattcctagtctggtttcttcagtggtgtgtttgtgttntagtacaacctgcaaaagagttactccattgtctaaaaatgcaa

SEQ ID NO: 516 - DNA, 279 bp, homo sapiens
cgtcccagatgttaggtgagccactgagctctgtgttgaccttgaggggcctggctgggggcccccaggctccatgccttcttgggagggtggccgccaacgcctttcctgtgttatggcaacagggagtgggcatctcatctgcctgtggtcagctctcagacggcagggagcggagctgacgttggctgtgcttggtcaccgctgccatgccgcagaggatgcgcctagctgggctggggccacacgactattatgttggccttgaacggggactgc

SEQ ID NO: 517 - DNA, 496 bp, homo sapiens
tcgacctgatgcagagccttctgaggagaggcaacaggaggcattctgtggccagccaaaaggtaccccgatggccaagcaattcctctgaacaaaatgtaaagccagccatgcattgttaatcatccatcacttcccattttatggaattgcttttaaaatacatttggcctctgcccttcagaagactcgtttttaaggtggaaactcctgtgtctgtgtatattacaagcctacatgacacagttggatttattctgccaaacctgtgtaggcattttataagctacatgttctaatttttaccgatgttaattattttgacaaatatttcatatattttcattgaaatgcacagatctgcttgatcaattcccttgaatagggaagtaacatttgccttaaattttttcgacctcgtctttctccatattgtcctgctcccctgtttgacgacagtgcatttgccttgtcacctgtgagctggagagaaccc

SEQ ID NO: 518 - DNA, 447 bp, homo sapiens
  misc_feature (49)..(49): n is a, c, g, or t
  misc_feature (153)..(153): n is a, c, g, or t
  misc_feature (177)..(177): n is a, c, g, or t
tgttacctttcagttacatgcctttgatcctaaaattctctacttttgntgccttatcagttctttgcaatctgcctgtggttatcagcacttaaagcacaattttgaaggggaaaaaaatgataatcaccttagtcccaaagaaataatttntgtcaaactgccttattagtattnaaaacagacacactgaatgaagtagcatgatacgcatatatcctactcagtatcattggccttttatcaaatggggaaactatacttttgtattacatagttttagaaatcgaaagttagagactctttataagtaatgtcaaggaacagtaatttaaaaacaaagttctaacaaatatattgtttgcttaatcacaatgccctcaacttgtatttgaataactaaataggacatgtcttccttggagctgtgggcattagttcagaagc

SEQ ID NO: 519 - DNA, 532 bp, homo sapiens
aagccttacagttatcctgcaagggacaggaaggtctgatttgcaggatttttagagcattaaaataactatcaggcagaagaatctttcttctcgcctaggatttcagccatgcgcgcgctctctctctttctctctcttttcctctctctccctctttctagcctggggcttgaatttgcatgtctaattcatttactcaccatatttgaattggcctgaacagatgtaaatcgggaaggatgggaaaaactgcagtcatcaacaatgattaatcagctgttgcaggcagtgtcttaaggagactggtaggaggaggcatggaaaccaaaaggccgtgtgtttagaagcctaattgtcacatcaagcatcattgtccccatgcaacaaccaccaccttatacatcacttcctgttttaagcagctctaaaacatagactgaagatttatttttaatatgttgactttatttctgagcaaagcatcggtcatgtgtgtattttttcatagtcccaccttggagcatttatg

SEQ ID NO: 520 - DNA, 414 bp, homo sapiens
gaactgaatgctgacctgttccgtggcaccctggacccagtagagaaagcccttcgagatgccaaactagacaagtcacagattcatgatattgtcctggttggtggttctactcgtatccccaagattcagaagcttctccaagacttcttcaatggaaaagaactgaataagagcatcaaccctgatgaagctgttgcttatggtgcagctgtccaggcagccatcttgtctggagacaagtctgagaatgttcaagatttgctgctcttggatgtcactcctctttcccttggtattgaaactgctggtggagtcatgactgtcctcatcaagcgtaataccaccattcctaccaagcagacacagaccttcactacctattctgacaaccagcctggtgtgcttattcag

SEQ ID NO: 521 - DNA, 561 bp, homo sapiens
ttcagttgctaatgaggctcctccgctctggacacaacccttttatagattaatttctctgccaattaacttgtcattttcagtacatattttactattccacaccaaccataattacaacaagggatttttcttatgcactcctatgcatgtgaataacatgtggtgtaattctgcttcttacagaagtattactgaaggtattatttccaatattatttggtttattatgcggatcttttttatatatgcagtcccatcccttctgtgccactcaatgccatccagacatggtttttccctccaggggcctttctctccagagggcacttcggctgcctctgcttcctctcattcgaggcccggctcttgctgacagaataggttccgttctgggcggtggttctcgagcctgccattcaaaaccaaagcaaattggagcatttctcacaacatggtattgaagttcctttttgttctcaaaagttgtgaccgtgttaaattgtactcccttagtcctgtaaggtatgttaagtgaatcgcagttacgctgtactttta

SEQ ID NO: 522 - DNA, 430 bp, homo sapiens
gctcggacagtgcccaagactgagcctggggtgcccggcacccagagggtgctgcccaccatgctcctgagcctcccaagagctgcagcccacgggcccggcccggcctggcccttcaggggatggccactgtgaaggacgccttcccagcctgcccgttgccaatctgctgtgagaggggggcctccctgccttggggccttagccctggctctgcacttttcctccggggagaaaggacactgcccctcccccgacctgggcccacactgctgccttctcccaggacggaggcttttggaccctcggaccccatcccactcagccaagtgtctttctgtgtctggggggaggaggggatgatatccgtgtggttcgatgtattatttttaagctccgtgagtgcgtgggtcagtgtctgcatgaagtg

SEQ ID NO: 523 - DNA, 522 bp, homo sapiens
agatgttccttttgtgaagcaccttgattccttgattttgattttttgcaaagttagacaatggcacaaagtcaaaatgaaatcaatgtttagttcacaagtagatgtaatttactaaagaatgatacacccatatgctatatacagcttaactcacagaactgtaaaagaaaattataaaataattcaacatgtccatctttttagtgataataaaagaaagcatggtattaaactatcatagaagtagacagaaaaagaaaaaaggactcatggcattattaatataattagtgctttacatgtgttagttatacatattagaagcatatttgcctagtaaggctagtagaaccacatttcccaaagtgtgctccttaaacactcatgccttatgattttctaccaaaagtaaaaagggttgtattaagtcagaggaagatgcctctccattttccctctctttatcagaggttcacatgcctgtctgcacattaaaagctctgggaagacctgttgtaa

SEQ ID NO: 524 - DNA, 264 bp, homo sapiens
gcttgaggaaacttcggttgcagattaagcatttcaggttgtgcattttgtgtgatgcatgtagtagcctttcctgataacagaacacagatctcttgttcgcacaatctacactgccttaccttcacttaaaccacacacacaaggtgctcagacatgaaatgtacatggcgtaccgtacacagagggacttgagccagttacctttgctgtcactttctctcttataaattctgttagctgctcacttaaacaatgtcctct

SEQ ID NO: 525 - DNA, 421 bp, homo sapiens
catgcagttgtggtttcgtttccttttggaatcttcaaaggcagcgattttcatattgcctcacaccctggcgggggcggggggctctgggaccactgggggacctgctaaatcctcttcagtctgagcagttcagccattgtcagttttagtattgtgtctctgtatttcacttgcagaaagagctttgcttctataaaggactttaaaaagtactccaaagagatctagttttggagtagaggggagatgttttctcaaacttagggcagtcctgagatgctcaggcagtagcccttttctcagttccctttgcgggtcttggtcagatgatgccctctagacccgtgctgtccaatatgtagccgctagccatgtgcagctgtcaggcccttgcaacgtggctggttcgagctgtgat

SEQ ID NO: 526 - DNA, 471 bp, homo sapiens
catggtggctgtgtacacccgcattttcttctacgtgcggcggcgagtgcagcgcatggcagagcatgtcagctgccacccccgctaccgagagaccacgctcagcctggtcaagactgttgtcatcatcctgggggcgttcgtggtctgctggacaccaggccaggtggtactgctcctggatggtttaggctgtgagtcctgcaatgtcctggctgtagaaaagtacttcctactgttggccgaggccaactcactggtcaatgctgctgtgtactcttgccgagatgctgagatgcgccgcaccttccgccgccttctctgctgcgcgtgcctccgccagtccacccgcgagtctgtccactatacatcctctgcccagggaggtgccagcactcgcatcatgcttcccgagaacggccacccactgatggactccaccctttagctaccttgaacttcagcggtacg

SEQ ID NO: 527 - DNA, 541 bp, homo sapiens
gtcctgggtctgacattgcctcaggaggggaagctcatccctccctccaagcccccgatgcggagctagggctggagctctgccaggtgccctggggccagcaaggcagtcccaggcctgccgtctccagcacggccccaaggtggacactagcccctgctgctgcaggcgccatgctgcttcagcagtgacgattgagccatttgtgagagagaatccggaagcgttaggtattacagcagactgacctaagacctatgtaaaaggaaagctgttccaacacacggactatttttgtactagaatttgctaacttgtaatattgaatttcctttggccgataatcaggatttccctataagtcacttggacattggtcacttgtaggaaatttaaactctaattatgacagctacactgaaaaataattgtactgaaattaacttgtctatcttcatttggttttatttttaaatgtttgtaaaaagagactgttttgggggaatgggggcaaaggggtgggcgatttcttttgtaagtg

SEQ ID NO: 528 - DNA, 331 bp, homo sapiens
  misc_feature (67)..(67): n is a, c, g, or t
aagacgcttccgaaacagacgtttgagtcggaaaccttggagtgcagtgaacccgctgctcaggcangcccccgccacttaaacgtgctgtgcgacgtgtctgggaaaggccccgtcactgcctgtgactttgacctccgcagcctgcagcctgacaagcggctagaaaacctcctgcagcaagtgagtgccgaggactttgagaagcagaacgaggaggcccggaggaccaataggcaggccgagctctttgccctttacccatcagtggacgaggaggatgctgtggaaatacgtccagtaccagaatgtcccaaggaacacctgggca

SEQ ID NO: 529 - DNA, 310 bp, homo sapiens
gggcctggagccagaaggcgacttattttttctctcctatgccaccccaggtggggagggagggaggtttcagactccagtttctcccttgcccttttattcccaagcctccttggccccagtataagtgttgggaactctctgccagcttcctgagttctgcctaaagatggccccccagcactggttggggacaagggccaaattggtgaccaccagtcatgcctaggacctggggcccaaaagccgggcaacctctggctacaggggccattgggtgccctcccagttgagaggggccgctgtttcg

SEQ ID NO: 530 - DNA, 449 bp, homo sapiens
  misc_feature (105)..(108): n is a, c, g, or t
  misc_feature (110)..(111): n is a, c, g, or t
  misc_feature (114)..(114): n is a, c, g, or t
  misc_feature (131)..(131): n is a, c, g, or t
  misc_feature (385)..(385): n is a, c, g, or t
aaagctttactttacaatgcccaattggaggccttacatggaatgctgctctcgaagatgtccgagatccttccagatgaatcaaaattcaatatgtaccggctnnnntnnggnagctcttatgaatcagnaacttggaaatggaacctcttctgatttgagctcacaatgtctctctgcaccaagctccatgactcaggatttgcctggagttcctgggaaagaccagttgttttcacagcctccagtgttaaggacagcttcacaagagggttgccaagaacttacacaagaacaaagagatcaactgagggcagatatcagtattatcaaaggcagataccggagccaaagtggagaggacgaatccatgaaccaaccaggnccaatcaaaaccagactggctattagtcagtcacatttaatgactgcacttggtcacacaagac

SEQ ID NO: 531 - DNA, 251 bp, homo sapiens
ccttgtgtgaagagagttgtcctgtgctccttctactgtactttttttattttttaataggaaagtgatgtgcttcagagaagggttcctccttaatgttgaggttttttaaaaataaaaatactgtttttaagctctttccttattggtttgcatgattattggcatctgcttacgatggctttaatcactcagagctaatggcacctttcctatttagcctcattttagaatgcagtcaacacatgtag

SEQ ID NO: 532 - DNA, 521 bp, homo sapiens
acgagttctcacctgatgtggtcctagtctccgccgggtttgatgctgttgaaggacatctgtctcctctgggtggctactctgtcaccgccagatgttttggccacttgaccaggcagctgatgaccctggcagggggccgggtggtgctggccctggagggaggccatgacttgaccgccatctgtgatgcctctgaggcttgtgtctcggctctgctcagtgtagagctgcagcccttggatgaggcagtcttgcagcaaaagcccaacatcaacgcagtggccacgctagagaaagtcatcgagatccagagcaaacactggagctgtgtgcagaagttcgccgctggtctgggccggtccctgcgagaggcccaagcaggtgagaccgaggaggccgagactgtgagcgccatggccttgctgtcggtgggggccgagcaggcccaggctgcggcagcccgggaacacagccccaggccggcagaggagcccatggagcaggagcctgccctgtga

SEQ ID NO: 533 - DNA, 549 bp, homo sapiens
agtgtatgtgttgacatttctccccatctcttcccactctgttttctccccattatttgaataaagtgactgctgaagatgactttgaatccttatccacttaatttaatgtttaaagaaaaacctgtaatggaaagtgagactccttccctaatttcagtttagagcaacttgaagaagagtagacaaaaaataaaatgcacatagaaaaagagaaaaagggcacaaagggattggcccaatattgattcttttttataaaacctcctttggcttagaaggaatgactctagctacaataatacacagtatgtttaagcaggttcccttggttgttgcattaaatgtaatccacctttaggtattttagagcacagaacaacactgtgttgatctagtaggtttctatttttcctttctctttacaatgcacataatactttcctgtatttatatcataacgtgtatagtgtaaaatgtgaatgactttttttgtgaatgaaaatctaaaatctttgtaactttttatatctgcttttgtttcaccaa

SEQ ID NO: 534 - DNA, 402 bp, homo sapiens
gtcaccgagggccgagggatttttgccagtggaagtccttttaagagtgtgactctggaagatggcaagaccttcattcctgggcagggaaacaatgcttacgtgttccccggggtggcactgggagtcatcgccggcgggatccggcacatcccagatgagatcttcctcctgacagcagagcaaattgcccaggaagtctctgagcagcatctgtcccaggggagactctatccaccactcagcaccatccgagacgtgtctttgagaattgccatcaaagttctcgactacgcgtacaaacacaacctggcttcctactacccagagcctaaggacaaggaggcttttgtaagatccctggtctacactccagactatgactcctttacactggacagc

SEQ ID NO: 535 - DNA, 481 bp, homo sapiens
aaggcctgctgtgtaagctgacagtatttgtagctgatagggggttgggaggaaagtgtctactaggagggtggggtgagattctgtgttgatgtaggaggccgagaaggcccttaactcaaagtagcttatttatccaaaatgttctggatgcatcatctccaaccaaggaccccttatttatcatgcctttgttctcttttccctcagatgtatatttctttaaaaataattttcctaataacaaaacttatttctaaaacagcttaaaaattcaaagaaaaaccccaaacactgacattacctacacttccactacccaaagacaaaatgtgcccactgtgtgcttttgagtgtattttcttttagtttgttttttgttgggtgcatatttatgataataacaatgatggacttcaattgtactcactgttctattgttggttttaattagcagcaagttgtgatcactttcccaggt

SEQ ID NO: 536 - DNA, 423 bp, homo sapiens
ggacctcagccatgagacttctcatcctggccctccttggcatctgctctctcactgcatacattgtggaaggtgtagggagtgaagtctcagataagaggacctgtgtgagcctcactacccagcgactgccggttagcagaatcaagacctacaccatcacggaaggctccttgagagcagtaatttttattaccaaacgtggcctaaaagtctgtgctgatccacaagccacgtgggtgagagacgtggtcaggagcatggacaggaaatccaacaccagaaataacatgatccagaccaagccaacaggaacccagcaatcgaccaatacagctgtgaccctgactggctagtagtctctggcaccctgtccgtctccagccagccagctcatttcactttacaccctcatggactgag

SEQ ID NO: 537 - DNA, 170 bp, homo sapiens
tccccaactaaagcctagaagagcttctgaggcgctgctttgtcaaaaggaagtctctaggttctgagctctggctttgccttggctttgcaagggctctgtgacaaggaaggaagtcagcatgcctctagaggcaaggaagggaggaacactgcactcttaagcttccg

SEQ ID NO: 538 - DNA, 167 bp, homo sapiens
gtcgagaaatcattcttgcacattggaaaaaccattgtgtgggaaggaaagaatgaaaatgaagtgggcagatgtaaagagaccggcaaagttcacgtgactgtggatctcaagtactaccggccaactgaagtggactttctgcagggcgactgcaccaaagcgaa

SEQ ID NO: 539 - DNA, 46 bp, homo sapiens
agcttccccaactaaagcctagaagagcttctgaggcgctgctttg

SEQ ID NO: 540 - DNA, 513 bp, homo sapiens
gcaggagctcagcatagacccagctctctgggggatggtcacctggtgatttcaatgatggcatccaggaattagctgagccaacagaccatgtggacagctttggccagagctcccgtgtggcatctgggagccacagtgacccagccacctggctcaggctagttccaaattccaaaagattggcttgtaaaccttcgtctccctctcttttacccagagacagcacatacgtgtgcacacgcatgcacacacacattcagtattttaaaagaatgttttcttggtgccattttcattttattttattttttaattcttggagggggaaataagggaataaggccaaggaagatgtatagctttagctttagcctggcaacctggagaatccacataccttgtgtattgaaccccaggaaaaggaagaggtcgaaccaaccctgcggaaggagcatggtttcaggagtttattttaagactgctgggaaggaaacaggccccattttgtat

SEQ ID NO: 541 - DNA, 509 bp, homo sapiens
tgtgtaatacgccaaccagtcaagttgtgttttggccagagatttagatatgtccaatttcctggctcatttcattgtgctctatgggtacgtataaaaagcaagaattctgtttcctaggcaaacattgcaactcagggctaaagtcatccagtgaaacttttagagccagaagtaactttgtcccagtcctacaatgtgaaaagagtgaatagttgcctctttttagccattttcatggctggtacatattcgtacgcattacttttcagaatcaatacgcactttcagatattcttatttttattctcttaagtctttattaactttggagagagaaatgatgcatctttttattttaaatgaagtagatcaacatggtggaacaaaatgataaagaacagaaaacatttcaatatattactaataactttttccaatataaatcctaaaattcctataacatagtattttacagttttatgaagctttctattgtgacttttatg

SEQ ID NO: 542 - DNA, 437 bp, homo sapiens
ctgacttgaatgtccaacgcaaagcaatacatgaactcatccaagtgatggctgaactgtcgccagcagctaaaacagggaagcgaaaaaggagtcagatgctgtttcgaggtcgaagagcatcccagtaatggttgtcctgcctacaatatttgaattttaaatctaaatctatttattaatatttaacattatttatatggggaatatatttttagactcatcaatcaaataagtatttataatagcaacttttgtgtaatgaaaatgaatatctattaatatatgtattatttataattcctatatcctgtgactgtctcacttaatcctttgttttctgactaattaggcaaggctatgtgattacaaggctttatctcaggggccaactaggcagccaacctaagcaagatcccatgggttgtgtgtttatt

SEQ ID NO: 543 - DNA, 531 bp, homo sapiens
atcctggccacagacagtttcaagtagtgtcagatttttgttgcttgggcggctgttggtagagtgggcagtgcccgcgccatggggtgctctgtgggcttctccaggagcagggagggtggaggggagggatggggggcacaggagctgggagccccgtctccaggaaaaggagaggggttaagatgcaccgaggctgtagctgggctacttgatcttgctgaaagtgtttctaaagatagcaccacttttttttttaaagcttttatatattaaaaaacgtatcatgcaccaactgtgaatagctgccgcttgcgcagaggacccggggaggggtcccgagaggctccccatgcaacactggaaatgactgttccagagagcgggcagacctggcagagcgcccctggcgcctgagactaccacccactccgttcctgccagaaacgaccctctgtggccgatgggccatgcgggcccctcgcagccaactcagccagtgttgggactggctcagagcccatgggggct

SEQ ID NO: 544 - DNA, 457 bp, homo sapiens
cacggccgtggacatgtggtcagtgggttgcatcttcggggagctgctgactcagaagcctctgttccccgggaagtcagaaatcgatcagatcaacaaggtgttcaaggatctggggacccctagtgagaaaatctggcccggctacagcgagctcccagcagtcaagaagatgaccttcagcgagcacccctacaacaacctccgcaagcgcttcggggctctgctctcagaccagggcttcgacctcatgaacaagttcctgacctacttccccgggaggaggatcagcgctgaggacggcctcaagcatgagtatttccgcgagacccccctccccatcgacccctccatgttccccacgtggcccgccaagagcgagcagcagcgtgtgaagcggggcaccagcccgaggccccctgagggaggcctgggctacagccagctgggtgacgac

SEQ ID NO: 545 - DNA, 443 bp, homo sapiens
gacggtgctgatggacttcgatgcgctggtgcaggcacagacaggcctgggcacagctgcggtgatcgtcatggaccgctcgacggacatcgtgaaagccatcgcccgcctcattgagttctataagcacgagagctgtggccagtgtaccccatgccgtgagggtgtggactggatgaacaaggtgatggcacgtttcgtgaggggggatgcccggccggccgagatcgactccctgtgggagatcagcaagcagatagaaggccatacgatttgtgctctgggtgacggggccgcctggcctgtgcagggtctgatccgccactttcggccggagctcgaggagcggatgcagcggtttgcccagcagcatcaggcccggcaggctgcctcttagcccaccaccctggcctgctgtcctgcgtctatccatgtggaatgct

SEQ ID NO: 546 - DNA, 539 bp, homo sapiens
ggagtactggcaacagacctgcctagagctggaacgttacctccagagcgagccctgctatgtttcagcctcagaaatcaaatttgacagccaggaagatctgtggaccaaaatcattctggctcgggagaaaaaggaggaatccgaactgaagatatcttccagtcctccagaggacactctcatcagcccgagcttttgttacaacttagagaccaacagcctgaactcagatgtcagcagcgaatcctctgacagctccgaggaactttctcccacggccaagtttacctccgaccccattggcgaagttttggtcagctcgggaaaattgagctcctctgtcacctccacgcctccatcttctccggaactgagcagggaaccttctcaactgtggggttgcgtgcccggggagctgccctcgccagggaaggtgcgcagcgggacttcggggaagccaggtgacaagggaaatggcgatgcctcccccgacggcaggaggagggtgcaccggtgccactttaacggctgcagga

SEQ ID NO: 547 - DNA, 528 bp, homo sapiens
gagcccgttcggtctgaggaaggccgggacatggcgaaccggatcagtgcctttggctaccttgagtgctcagccaagaccaaggagggagtgcgggaggtgtttgagatggccactcgggctggcctccaggtccgcaagaacaagcgtcggaggggctgtcccattctctgagatccccccaaagggcccttttcctacatgccccctcccttcacaggggtacagaaattatccccctacaaccccagcctcctgagggctccatactgaaggctccattttcagttccctcctgcccaggactgcattgttttctagccccgaggtgtggcacgggccctccctcccagcgctctgggagccacgcctatgccctgcccttcctcatgggcccctggggatcttgcccctttgaccttccccaaaggatggtcacacaccagcactttatacacttctggctcacaggaaagtgtctgcagtagggacccagagtcccaggcccctggagttgtttctgcaggg

SEQ ID NO: 548 - DNA, 358 bp, homo sapiens
  misc_feature (146)..(146): n is a, c, g, or t
  misc_feature (180)..(181): n is a, c, g, or t
gaaactgtatgggtagcttttttgtttgttttttgttttgtttttgtttttgtttttgtttttagttgtaggtcgcagcggggaaattttttgcgactgtacacatagctgcagcattaaaaacttaaaaaaattgttaaaaaaanaaaaaaagggaaaacatttcaaaaaaaaaaaaanngataaacagttacaccttgttttcaatgtgtggctgagtgcctcgattttttcatgtttttggtgtatttctgatttgtagaagtgtccaaacaggttgtgtgctggagttccttcaagacaaaaacaaacccagcttggtcaaggccattacctgtttcccatctgtagttattcg

SEQ ID NO: 549 - DNA, 499 bp, homo sapiens
cggcaactttgctgatggggtgattgctgcttctggggggtaaggaaacaagttacagaaattaccgcgttctgtgtgaagggactgagggtgtggtgtcattggcagagggtcattttaggagagctgccccagcccctcgaacgcctggcttggggtgtcattctgcctggcggccaggcctccagcttcccctgccccgggcctggggctgtcactggccctgatccgaacacctccagattccggcttctacatgggacagacggggacgcacaggccaccttccttctggcagggactcttatttattcccattgctctagggctttcggtttccccttcttccggtaggccgcgtagaggcatgcaccgggtaggtttccgcggtgaccccgcggcggcctgagggacgctccctgccccatcccggctgttgggctgggccgctttgcctctgcttcgccctgtgctgtgttctccagctttgtagcagcag

SEQ ID NO: 550 - DNA, 544 bp, homo sapiens
tacctcaatctcatcaactactacaagggccagtacatcctcacactgtcagaggacatcgtggatggccatgagcgggccatgctcaagcggctcctgcggatcgactccaagtgtctgcacttcactcccaaggactggagcaagagggggaagtggtgaccagacactgcccactgcagtgccaagacggcagcaggactggggctgatagcccaccccgcccccactgcagctcccacaaagcactctaagggagatggggctgaggacagctcaaaaaggagaggacaggcctggcaggggcccactggtgcccagcaccaaggcgagctccgggctcagaccaactccaaggtcagctggccacaggcccaggcctcctctgaagcagggaccagagggagccaggcagctgtgtacagtgagaagggatccggatgggggagctctgtacagagggctggtgattgtaaaaatttcttttgtaaagtagaagttgggggtggggtgggtgctggctgcaaaaatttctggcttctct

SEQ ID NO: 551 - DNA, 466 bp, homo sapiens
ctctgcagtgtcctcttgttaatggtggggttttctgctttgtttttatttaagaaaataaacacgacatatttaaagaaggttctttcacctgggagcaaatgaacaatagctaagtgtcttggtatttaaagagtaaattatttgtggctttgctgagtgaaggaaggggagcaaggggtggtgcccctggtcccagcatgccccgcgcctgagactggctggaaatgctctgactcctgtgaaggcacagccagcgttgtggcctgagggaggccctgctgggaccctgatctgggccttcctgtcccagggcctatgggcaactgcgttgaaaggacgttcgccaagggccgtgtgtaaatacgaactgcgccatggagaggagaggcactgccggagcccttgccagatctccctccctctctctgtgcagtagctgtgtgtccgaggtcagtgtgcggaa

SEQ ID NO: 552 - DNA, 484 bp, homo sapiens
cagaaactttcccagaagatggaggagagtatatgtgtaaagcagtcaacaataaaggatctgcagctagtacctgtattcttaccattgaaagtaagaattaatcactctttttatcttttattctattaatttttttttccttaaaatcacttttcttcttctcttttttagctgatgactactagctcccctcccctctccctggaactttctctttcactccaactttcttactacatccatcttttctgtggcggggccaaaaaaggaaaccaggagtgccactatgctgacttcttattccttttcataacagtcttcaaagcacagctcatctaaagaatgcctacttcttttccaaataagcatcagatttatcgcctattatgcagtaacagtcaataaaatgtacttatgggggggaattactcaattattctatcagaacctattataaagactgtatttcccatagacgttt

SEQ ID NO: 553 - DNA, 534 bp, homo sapiens
  misc_feature (186)..(186): n is a, c, g, or t
ccgacagctgcttcggggacgatgaggatgactctggcacggaggagtcctgacaccaccagaataaacttgccgagtttacctcactagggccggacccgtggctccttagacgacagactacctcacggaggttttgtgctggtccccgtctcctctggttgtttcgttttggctttttctccntccccatgtctgttctgggttttcacgtgcttcagagaagaggggctgccccaccgccactcacgtcactcggggctcggtggacgggcccagggtgggagcggccggcccacctgtcccctcgggaggggagctgagcccgacttctaccggggtcccccagcttccggactggccgcaccccggaggagccacgggggcgctgctgggaacgtgggcggggggccgtttcctgacactaccagcctgggaggcccaggtgtagcggtccgaggggcccggtcctgcctgtcagctccaggtcctggagccacgtccagcacagagtggacggattcaccgtggccg

SEQ ID NO: 554 - DNA, 296 bp, homo sapiens
  misc_feature (250)..(250): n is a, c, g, or t
gattgatattcgactctccagggttcaggatatcaagtatgagccccagctccttgcagatgatgatgctagactactacaactggaaacccagggaaatcaaagttgctacaactatctgtataggatgaaagctctggatgccattcgtacctctgagatcccatttcattctgaaggccggcatccccgttccttaatgggcaagaatttccgctcctacctgctggatctgcgaaacactagtacngcctttcaagggtgtacgcaaagcactcattgatacccttttggat

SEQ ID NO: 555 - DNA, 547 bp, homo sapiens
acctgcatgttctgattgggacctcagtggtcatcttcctcttcatcctcctcctcttctttctcctttatcgctggtgctccaacaaaaagaatgctgctgtaatggaccaagagcctgcgggggacagaacagtgaataggcaggactctgatgaacaagaccctcaggaggtgacgtacgcacagttggatcactgcgttttcatacagagaaaaatcagtcgcccttctcagaggcccaagacacccctaacagataccagcgtgtacacggaacttccaaatgctgagcccagatccaaagttgtctcctgcccacgagcaccacagtcaggtcttgagggggttttctagggagacaacagccctgtctcaaaaccaggttgccagatccaatgaaccagcagctggaatctgaaggcatcagtctgcatcttaggggatcgctcttcctcacaccacgaatctgaacatgcctctctcttgcttacaaatgcctaaggtcgccactgcctgctgcagagaaaacacactcctttgcttag

SEQ ID NO: 556 - DNA, 336 bp, homo sapiens
tattattccacatatttttccttgaagttcttagcataatgtatccattacttagtatatatctaggcaacaacacttagaagtttatcagtgtttaaactaaaaaaataaagattcctgtgtactggtttacatttgtgtgagtggcatactcaagtctgctgtgcctgtcgtcgtgactgtcagtattctcgctattttatagtcgtgccatgttgttactcacagcgctctgacatactttcatgtggtaggttctttctcaggaactcagtttaactattatttattgatatatcattacctttgaaaagcttctactggcacaatttatta

SEQ ID NO: 557 - DNA, 340 bp, homo sapiens
caggaaggaagggcgcagcgtcccctccttcagaggaggctctgggtggggcctgctccccatccccccaagcccacccagcactctcattgctgctgttgagttcagcttttaccagcctcagtgtggaggctccatcccagcacacaggcctggggcttggcaggggcccagctggggctgggccctgggttttgagaaactcgctggcaccacagtgggcccctggacccggccgcgcagctggtggactgtaggggctcctgactgggcacaggagctcccagcttttgtccacggccagcaggatgggctgtcgtgtatatagctggggcgaggg

SEQ ID NO: 558 - DNA, 523 bp, homo sapiens
gtaaatactgcttgaccgtactctcacatgtggcaaaatatggtttggtttttcttttttttttttgaaagtgttttttcttcgtccttttggtttaaaaagtttcacgtcttggtgccttttgtgtgatgccccttgctgatggcttgacatgtgcaattgtgagggacatgctcacctctagccttaaggggggcagggagtgatgatttgggggaggctttgggagcaaaataaggaagagggctgagctgagcttcggttctccagaatgtaagaaaacaaaatctaaaacaaaatctgaactctcaaaagtctatttttttaactgaaaatgtaaatttataaatatattcaggagttggaatgttgtagttacctactgagtaggcggcgatttttgtatgttatgaacatgcagttcattattttgtggttctattttactttgtacttgtgtttgcttaaacaaagtgactgtttggcttataaacacattgaatgcgctttattgcccatggga

SEQ ID NO: 559 - DNA, 516 bp, homo sapiens
ggaccttacagaggcggctatggcggtgggggtggctatggaggcagctccttctaaaagaaaatttaaaatgcctgggagtggctataggggtagctctttccaacagcccaagtggggtcaactcctaagccccaccccctcacacacaccgccttccctgttttgcccttgggggagccacttctaaggctgcttacccttgggggtgttcctctatttgcctgccacctctcttgtctctccctctgaagatggactcggccccacatacacatttttgtgttacagtcattgatggactctatttttttattattacttggaccttggtcgtttttatactagcaaaatgtcttgttttaatttgtgttttttggggggagggagggagtgaacttgctgattctgtagcaaaacctgggtgggggttggggtggggggtagtttactttgttgtaaggacttgataacctggctacagcgttttctatgaaatctacttggatcccatgc

SEQ ID NO: 560 - DNA, 477 bp, homo sapiens
tcagggccaggagtggcgtttccgcacaggatttcctaagacgagagggatttagccaagagcacagacttggattccttctgtccctccccacctttctctcccaatgaagaaacgtttatatcctgtgattactctaggaaaggggcgtattaacggtcctttgcttccccgcaggggagaaaaagcttgacgaacttcacagaagagttcaagcttggaaataatggagtttatagagaaaagatatatttttaaaagctctaggtcagaagtactacacagtgcttttaaaaagtgtttaatgagagtttacagacagaagcccgaagtggaaagaccttatggttttgtagatatggtgactccagtctttgttgtataaaggttgggggagctgataaggtttttgtacagtattttctccttcgttgtattgatttttgtataaaaatgtaacttctacgtgtctaacac

SEQ ID NO: 561 - DNA, 484 bp, homo sapiens
tacagatcagcgcgcacatggggtccttctgctgtctctggggcgagtcttggagccccctggggggctctgttggtgctgatttggacccgtttctctttttaaactgcacatcataacagggcttcatgtcgagcatgattttaatcataaatgcacttctgaggtgcaaggattgagctcagagctgctctgttgtggcaaaacccaaagtgctgtgatgtgtggctgtgacaagcctggagcgggtcctgtgagcgccgcctctgtctcctgcttcctcactgaacgcctgctgaatgtgccgctgactcagctgtgctgctttcagccctcctgtgaggggcggtcccagtgcacagatgtttttcaagttcctcagtttgtactgaaattagggattcatcagggcaggaagcaggcaggcctctcagaagggagaggaggcctccaaatctattgagtccccacagtttgctcaagc

SEQ ID NO: 562 - DNA, 134 bp, homo sapiens
gggacagatctgatgatcccaggaggctctggaggacaatctaggacctacattatctggactgtatgctggtcatttctagagacagcaatcaatatttgagtgtaaggaaactgtctggggtgattcctaga

SEQ ID NO: 563 - DNA, 334 bp, homo sapiens
  misc_feature (29)..(29): n is a, c, g, or t
ttcagaggcagtgttcatagtcggaactncaccaatgcatggatacctccaaaaatttataccagaagaaggcagcttgggtgcagatgaaaagtccctttgactttcacacaaccggatgtggaggatggcaatatcctttatgtgcagacatcccccaaccaagaacaggactgtttttccctggatgtgatgaatggtttccaagttgtgagcagagtcgaaatcttggtggacaccacgcctaagtggatttttctgcaggtacagaatttcacagttcaagaaggtggctccagagaacttctagaagactacctcaaaattccaagta

SEQ ID NO: 564 - DNA, 352 bp, homo sapiens
agatggcgattttgctgacagctgccaagaaaatgcttcactcaacagtcctcatgtgcccagagatgtttatagaactgtttgaattgcagccatcccctgccccctcccaggctgaagatctgttctttttaagttgattcgggagtggcattcttttatacccaaagactgtagtgcatcttgaagagctcaaagcacatgaccgcacaaatgcttacagggtttcctcccgagtaatccaatctcactccccttgtaagggaattctggggcagctatggtttgagtatgcagtttgcatcgtgtttctacctttagtaccttgccactcttttaaaacgctgctgtc

SEQ ID NO: 565 - DNA, 508 bp, homo sapiens
agatctccatttcttcaagtgtttaacaacagtcctgatgagtcgtcatattacagacatcattttgcccggcaggacctgacccagtccctcatcatgatccagcccattctctactcttactcctttcatgggccaccagagccagtactcttggatagcagcagcattctagctgacagaattttgctgatggatactttctttcaaattgtcatttatcttggtgagaccatagcccagtggcgtaaagctggctaccaggacatgcccgagtatgaaaacttcaagcaccttctgcaggcaccactggatgatgctcaagaaattctgcaagcacgcttcccgatgccacgttacatcaacacggagcatggaggcagtcaggctcgattccttttgtccaaagtgaacccatctcagacacacaataacctgtatgcttggggacaggaaactggagcacccatcctaactgatgatgttagcctgcaggtgttcatggacc

SEQ ID NO: 566 - DNA, 544 bp, homo sapiens
  misc_feature (46)..(46): n is a, c, g, or t
  misc_feature (64)..(64): n is a, c, g, or t
  misc_feature (66)..(66): n is a, c, g, or t
  misc_feature (97)..(97): n is a, c, g, or t
taaactaacccttacattccatgtgatgtgatgtaggcttataagntgctaaaatctataggtntnggaagtgaaagattctattttttcttttttngtacataatgggaatttcattccagattatattttatttacatattaatttcacagaatattaatatttcttaacttcttaaagcatgctagcgttttatgtatatgtacacatatattcagacagggtaattttatctgctgcctaacattgtactaaaatattgctttatctgtttttaattacaaaatgctaatgatttcttaaattatagtttaaagacaattggcccaggaagcaaatcccctgcctttagtatgaaccactataagtaaccttacaaatagagttaatccaagacaatattaacaaactgtgctttgtctttaataaaagggataggattaacaaacatattgatggcataacctattcagctatgtccttatttttgcaataatgtaacctcaaatattggattgttgaaccaacaatggctgtgttaaa

SEQ ID NO: 567 - DNA, 275 bp, homo sapiens
gtttctgtatgagaacgcccggagtggggcagaggcggaacccgaggaccaggacgagggggagtggggcctggaccaggagcaggtgttctccttgggggatggcgtcagcggcggtttctttggcattagggacagcagcttcctgtagcgaggaagcgtgttgtcttacaagtcatccccgcagcagcccattggatgctttgctgtaaatacttacccggtcagcttggttttgaacctcagagaccatccactgtctttgacacctagaa

SEQ ID NO: 568 - DNA, 155 bp, homo sapiens
agggtttcatccaggatcgagcagggcgaatggggggggaggcacccgagctggccctggacccggtgcctcaggatgcgtccaccaagaagctgagcgagtgtctcaagcgcatcggggacgaactggacagtaacatggagctgcagaggatg

SEQ ID NO: 569 - DNA, 419 bp, homo sapiens
  misc_feature (26)..(26): n is a, c, g, or t
gcagctagcttgggctggattctcanacccaggctgccccttggattgttctacccaagcttttccctggggtctgggctcactccataaggtaaggtgccttttaccttatggtccttctttagcaggtaacaaaggagcatcaggggcaggctgccctggtggcatcacactggctagtgaggccgtgaatatcttgtcccccagcagggccgacagtttctatcacagaaaacagtgtgttcagtggtgaaaatcgttgcatgcatgttttcatctgagcgtgtccttctcccatactccctatcagccagccctgcctgtagctgctgtatggtgattgcacttggacatcagtccaatgactgcaagtcggcctggattttcacttgcagaggctacagctgcattgtcaggtc

SEQ ID NO: 570 - DNA, 494 bp, homo sapiens
tgctggacattctagccgacagccgccatctctggagcccctttggtttacgctcccttgcagcctccagctccttttatggccagcgcaattcagagcatgatcccccctactggcggggtgctgtgtggctcaatgtcaactacctggctttgggagcactccaccactatgggcatctggagggtcctcaccaggctcgggctgccaaactccacggtgagctccgtgccaacgtggtaggcaatgtatggcgccagtaccaggctacaggctttctttgggagcagtacagtgaccgcgatgggcgaggcatgggctgccgccctttccacggctggaccagccttgtcttactggccatggctgaagactactgaagggagggagaggaggggagccaagacactcatgccactctggctctgaagggacaaaggcttctggcttttgcccccagccccttggataccagtaattcaaaccttcctcat

SEQ ID NO: 571 - DNA, 110 bp, homo sapiens
tctgcaactcgccgctggagtttgacgaggagaccctttatacgtgaaggtgtacctggtgctcggtgacatcatcttctacgacctgaaggacccgtttgatgcagccg

SEQ ID NO: 572 - DNA, 432 bp, homo sapiens
tgaccctcgtcacataggctggaaagatttcaccgcctacagatggcgtctcagccacaggccaaagacgggtttcattagagtggtgatgtatgaagggaagaaaatcatggctgactcaggacccatctatgataaaacctatgctggtggtagactagggttgtttgtcttctctcaagaaatggtgttcttctctgacctgaaatacgaatgtagagatccctaatcatcaaattgttgattgaaagactgatcataaaccaatgctggtattgcaccttctggaactatgggcttgagaaaacccccaggatcacttctccttggcttccttcttttctgtgcttgcatcagtgtggactcctagaacgtgcgacctgcctcaagaaaatgcagttttcaaaaacagactcatcagcattcagcctc

SEQ ID NO: 573 - DNA, 339 bp, homo sapiens
gccccattcacctgtggatttgtgcgagatgcagcctcagaaggaacaaggcccccagagggaggtcacctgggggcaactggtgccgggtcttcacccagaccacgctgggtcccctctgttgggggtttggggtccgggtctcccaccagccactgcttcctcctgggccctcaattccacccctcgtcttccctccctcggggccctgatgcgtggcggcccccacccggcctcggctctttactccattcacagccatgcacgcgctcaagtacaccagggtgcgagatgccagctctggagttctcggttgttgtaggaggttgggtgttttca

SEQ ID NO: 574 - DNA, 302 bp, homo sapiens
ccaggacaccgctgtcctggcatttgtggccactcactttgtaggaaactcatctccttcctgaggagccgggaggctggaccagtcccgtcgtgcagtcaggtgggcggtgtgtctttccagaaggtcacgtggaaatgtctcgggacttgggtcccggagtgcccgtgaagcgtgtttttgctcctgaggtgcattttctcatcatccttgctttaccacaatgagcaatgaggtcgggttttatatgcaacttattgtatctgaattcctgtaggcacaccctccatagggtatgattt

SEQ ID NO: 575 - DNA, 345 bp, homo sapiens
  misc_feature (28)..(28): n is a, c, g, or t
gacgctgtggcgtgtgacgaggtgcctngccttctgccaaccaactaacccactaaccaggcccgagcatgccctactaaccacccccccgcagccagatcctactaactgtgcagctcatgggcctttcaaggggctgggatatgggggcagccaaggctccagaaggctctgcctatgggctgggatctttgtgcagacccacgttccaggacagagaatgcaaataagactcaccagctctgccacttcctgttgagtgagtttgagtaagtcacctcacttctctcaacctcagtttcctcagtggtagaatgcgagttctgataccttacaggttgcagt

SEQ ID NO: 576 - DNA, 452 bp, homo sapiens
ctgctgtcttcgacttgggtcagagaaggtgagcagacccggcagcagcctgtcccggggctcaggaagaggcaggcccatcccctggccccaagcacccagcacaacagagggtggcgggcagtgagggcctggcgttgcctgggccccacttctcagccccagctgctgggcctccaaggttgggctgaggatggagttttggctctgggtttgccctgactcctgctggaagacgctgccctggtttttcaccctctagtggccttggacattgagtatttgtagaaatgcagattacattgcaaatggaaacctttgccaggaagacacatgcattttgcttttaattctttgagacatttgattttgtcttagggactgacctttcagcatcaaagaaatacatatctactgtatccgccaaagtttgtgatgcctgcatagacgct

SEQ ID NO: 577 - DNA, 522 bp, homo sapiens
ttttcattgttcattgatatgctcagtatgctgccacataagatgaatttaattatattcaaccaaagcaatatactcttacatgatttctaggccccatgacccagtgtctagagacattaattctaaccagttgtttgcttttaaatgagtgatttcattttgggaaacaggtttcaaatgaatatatatacatgggtaaaattactctgtgctagtgtagtcttactagagaatgtttatggtcccacttgtatatgaaaatgtggttagaatgttaattggataatgtatatataagaagttaaagtatgtaaagtataacttcagccacatttttagaacactgtttaacatttttgcaaaaccttcttgtaggaaaagagagctctctacatgaagatgacttgttttatatttcagattttattttaaaagccatgtctgttaaacaagaaaaaacacaaaagaactccagattcctggttcatcattctgtattcttactcactttttcaagtt

SEQ ID NO: 578 - DNA, 505 bp, homo sapiens
  misc_feature (95)..(98): n is a, c, g, or t
  misc_feature (117)..(117): n is a, c, g, or t
  misc_feature (129)..(129): n is a, c, g, or t
  misc_feature (131)..(131): n is a, c, g, or t
  misc_feature (139)..(139): n is a, c, g, or t
  misc_feature (141)..(142): n is a, c, g, or t
tatttgctattctctcgaactaatgttattactacacaaaaaatcgggctgtgttttgagaagcatcaaaacaccatatactggtagacttgacnnnntggtaatatgtggaatgtnactctgttcttngncttggcantnngtgctacttttaaaaaaaaagtataacatgggataaagttcaaattctattgtagaactctagatttattaataacgtaaaacaactatttacaaagtaccaatgtcagaaaatttctccaatacttgtacatttcttttctcaggtaaatacaatttttagtctctttctgagataaacaatagctgagtccagattttttttaaggattgatttattgtctatcagtctttatatgttaggcacccattttcagagaaagagattggtttatttcatttgttatgaccttttgaattgatgagacattgaacaatggtcaatattttgaaactctttggaagttaccatccaagtttttct

SEQ ID NO: 579 - DNA, 295 bp, homo sapiens
acccccctgcagcaactaagatggtgggggagagggggttagaataaagcatctgaatacagttttcaggacctcaagcagacttcctagagacttgtttctgagacagttctttgccttcacttccctgctagctgggaaagaagagtggagcagagactctgcctggccactgagaacagccaaattcacaaaccctcagtggggctttgtttttggattttctccggactcatcagtaaacctgtagaagtgtcgctttccagccttttgtttctggatcctcaaaactcag

SEQ ID NO: 580 - DNA, 456 bp, homo sapiens
taatggaccaagagcctgcgggggacagaacagtgaataggcaggactctgatgaacaagaccctcaggaggtgacgtacgcacagttggatcactgcgttttcatacagagaaaaatcagtcgcccttctcagaggcccaagacacccctaacagataccagcgtgtacacggaacttccaaatgctgagcccagatccaaagttgtctcctgcccacgagcaccacagtcaggtcttgagggggttttctagggagacaacagccctgtctcaaaaccaggttgccagatccaatgaaccagcagctggaatctgaaggcatcagtctgcatcttaggggatcgctcttcctcacaccacgaatctgaacatgcctctctcttgcttacaaatgcctaaggtcgccactgcctgctgcagagaaaacacactcctttgcttagcccacaagtat

SEQ ID NO: 581 - DNA, 463 bp, homo sapiens
accaacacggtgactgcggtgaagaatgctcagatggctcagtccccaatcctgcttctgggtggggctgccagcactctgctgcagaaccggggtgcgctccaggctgttgatcagctgtcccttttccggccacccggttgtggtcaacatcctcattgggaggacggacttccgcgatggctccattgctgtatagggccttgtgggtcaggacgcttggctgccttcctgcccctggactgtgtccagctggtttggagtctcatcattgcttgccctgggcctatcccatgaggcccagtgactccacaacctccctgaggaggggatggaggggtcaaatctcagagaggctctcttgtgagctcttggaccctcctcttcacggacccaactgtgccgtttgtcccctctcttatggagactgaataaaccacctctggcccatgtaggcccaagt

SEQ ID NO: 582 - DNA, 119 bp, homo sapiens
cgtccatgcgggacctgtacatcaagaacggccagggcttcatcctggtctacagcctcgtcaaccagcagagcttccaggacatcaagcccatgcgggaccagatcatccgcgtgaag

SEQ ID NO: 583 - DNA, 296 bp, homo sapiens
  misc_feature (214)..(215): n is a, c, g, or t
tgccttaaacaggttcccacgcatttcctggcgctattgagcttggagctgccaagggcctgccttcacttgtggcatcgcagttactgactctccagtgggccaggccctacctagctgggacctgagggtcaggatacgggaagagggctactgccgccctgacttgtaggtaagctaaaacatctaggcaaattactctgtcaactgtccnncctgctcagcctcaggaagaaataagttcctgctgggccccaggctcagccacaaaaccagactgagcacatctgggcctt

SEQ ID NO: 584 - DNA, 434 bp, homo sapiens
aacggccatttgggatgccagggtggatgaaaaggtgaagaaatcaggggattgagacttgggtgggtgggcatctctcaggagccccatctccgggcgtgtcacctcctgggcagggttctgggaccctctgtgggtgacgcacaccctgggatggggctagtagagccttcaggcgccttcgggcgtggactctggcgcactctagtggacaggagaaggaacgccttccaggaacctgtggactaggggtgcagggacttccctttgcaaggggtaacagaccgctggaaaacactgtcactttcagagctcggtggctcacagcgtgtcctgccccggtttgcggacgagagaaatcgcggcccacaagcatcccccatcccttgcaggctgggggctgggcatgctgcatcttaaccttttgtatttat

SEQ ID NO: 585 - DNA, 522 bp, homo sapiens
  misc_feature (76)..(76): n is a, c, g, or t
  misc_feature (123)..(123): n is a, c, g, or t
  misc_feature (227)..(227): n is a, c, g, or t
  misc_feature (232)..(232): n is a, c, g, or t
  misc_feature (255)..(255): n is a, c, g, or t
  misc_feature (398)..(398): n is a, c, g, or t
ctggtcctggtggtagctattttgcttttggacataaaatcttggtagcttaatgtatttgttcctagggctgcantagcaaagtaccacaaaccgggtggtactggtactgtgggttgtccngcagttctggagactggaagtctgaaatcagatgctggcagggttaatttgtcctgagggctgtgagggagacacagctcctggctttctcctagctgctggtngtttnctggcaacctttggcattccttngcttgtggcatcatcactccagtattcatgtgatattcttcctgtgtgtgtgtctctatgtcaagatttcccctgtttataagaaaaccagtcatattgggttagtggttgagcccaccttactgaccaaataaagtcacatntcgaggtactacgggttaggatttcaacatgtacattttagagggacacaatttaatctataatagtgtggaattttcttttgggtatctaccagtcaccaagatatttatccctacttgacca

SEQ ID NO: 586 - DNA, 364 bp, homo sapiens
cagcacctagaaccatccagggctgaaaagtcccctccaaaccacgtgatgaggaacttgaggcaagtcaccagcccctgatcatttcgcctaaaagagcaaggactagagttcctgacctccaggccagtccctgatccctgacctaatgttatcgcggaatgatgacccagggctcctcagagcaggaactccactatgcatctctgcagaggctgccagtgcccagcagtgagggacctgacctcaggggcagagacaagagaggcaccaaggaggatccaagagctgactatgcctgcattgctgagaacaaacccacctgagcaccccagacaccttcctcaacccaggcgggtggaca

SEQ ID NO: 587 - DNA, 324 bp, homo sapiens
gaagcattctgagtgctctgtctgccctggtgggtttcattatcctgtctgtcaaacaggccaccttaaatcctgcctcactgcagtgtgagttggacaaaaataatataccaacaagaagttatgtttcttacttttatcatgattcactttataccacggactgctatacagccaaagccagtctggctggaactctctctctgatgctgatttgcactctgctggaattctgcctagctgtgctcactgctgtgctgcggtggaaacaggcttactctgacttccctgggagtgtacttttcctgcctcacagttacattg

SEQ ID NO: 588 - DNA, 133 bp, homo sapiens
ttccagagctacccagaccatatggtgcacccacagatccagctgcagctggtcctttaggtccatggggatccatgtcttctggaccttgggcgccaggaatgggagggcagtatcctacccctaatatgcc

SEQ ID NO: 589 - DNA, 499 bp, homo sapiens
tcaggtggtactggagcacatgcctgtaggccctgatgccattctcagatacgttcgcagggttggtgatcccccccagccacttcctgaggagccaatggaagttcagggagcagaaagagcttcccctgagcctcagcgggagaatgcttccccagcccctggaacaacagcagaagaggccatgtcccgaggtccacctcctgctcctgaggggggctcccgggatgaacaggatggagcttcagctgagacagaaccttgggcagctgcagtccccccagaatgggtccctattatccagcaggacattcagagccagcggaaggtgaaaccgcagccccctctgagtgatgcctacctcagtggtatgcctgccaagagacgcaagctccggtctgatatacaaaaacgactgcaggaagaccccaactacagtccccagcgcttccccaatgcccagcgggcctttgctgatgatccttagctctttgctcta

SEQ ID NO: 590 - DNA, 544 bp, homo sapiens
  misc_feature (383)..(383): n is a, c, g, or t
caagtatgcagaccctgtggctgacctcctagaccgctggggtgtgttccgggcccggctcttcagagaatcatgtgtttttcatcgtgggaactacgtgaaggacctgagtcgccttgggcgggagctgagcaaagtgatcattgttgacaattcccctgcctcatacatcttccatcctgagaatgcagtgcctgtgcagtcctggttcgatgacatgacggacacggagctgctggacctcatccccttctttgagggcctgagccgggaggacgacgtgtacagcatgctgcacagactctgcaataggtagccctggcctctgcctgcctcccgcctgtgcactctggaacctctggcctcaggggacctgcctgtcnctcagctccctgggagctgaaagtgaggatactccgtgctccaggccacagggtgaatgtggccatgcctacctgttttgtttttttaagaacagaaacaactattttaaaagaactcttttaagaaatttcataaagggacatgcattttactgggtttg

SEQ ID NO: 591 - DNA, 446 bp, homo sapiens
  misc_feature (41)..(41): n is a, c, g, or t
  misc_feature (122)..(122): n is a, c, g, or t
  misc_feature (148)..(148): n is a, c, g, or t
  misc_feature (152)..(152): n is a, c, g, or t
  misc_feature (159)..(159): n is a, c, g, or t
tgacttgtatgctgaactccgctgcatgtgtataaagacancctctggaattcatcccaaaaacatccaaagtttggaagtgatcgggaaaggaacccattgcaaccaagtcgaagtgatanccacactgaaggatgggaggaaaatnctgncctggancccagatgctcccagaatcaagaaaattgtacagaaaaaattggcaggtgatgaatctgctgattaatttgttctgtttctgccaaacttctttaactcccaggaagggtagaattttgaaaccttgattttctagagttctcatttattcaggatacctattcttactgtattaaaatttggatatgtgtttcattctgtctcaaaaatcacattttattctgagaaggttggttaaaagatggcagaaagaagatgaaaataaataagcctggtttcaaccctct

SEQ ID NO: 592 - DNA, 366 bp, homo sapiens
gaaaaggaacccgtgtgactgtggaaccaagaagtcagcctcataccaaaccatccgtttttgtcatgaaaaatggaacaaatgtcgcttgtctggtgaaggaattctaccccaaggatataagaataaatctcgtgtcatccaagaagataacagagtttgatcctgctattgtcatctctcccagtgggaagtacaatgctgtcaagcttggtaaatatgaagattcaaattcagtgacatgttcagttcaacacgacaataaaactgtgcactccactgactttgaagtgaagacagattctacagatcacgtaaaaccaaaggaaactgaaaacacaaagcaaccttcaaagagctgccata

SEQ ID NO: 593 - DNA, 296 bp, homo sapiens
acgcagtgaatgttatctgatgcacaaaggaaaataataatacaaaacccataacctattcattgtattgttgcggtagatcgagctacatgctgcacagcaaaagaccttctttgcacttctttcaagcagaattattgctgtatattcactctgaactgagagatcattgcaaaaaaaaaaaagaagaagaagaagagaagaaaagaaaaaagaaataggttaagcaaattttgtggtggtgcttatgtgtgcacagacatgcatgaggcctccgcatcttccaaacttggaaa

SEQ ID NO: 594 - DNA, 538 bp, homo sapiens
gacctaatacatttcctctgtgtgtgtgtgtaacattccaaatactttttttttcttttccactgtttgtaaggtgcaacaatttaatatttttaagggactttttaagagttccttaagaaccaatttaaaattacttcagtgcaatcctacacagtatcaacattagaattttgatattagtcttatgttatcttccattctatttttatctgctttttgctgctagtttcaaactgccagtatttttccttttgcttttaaaatagttacaatatttttcatgatagccacagtattgccacagtttattataataaagggtttttatttgatttagcgcattcaaagcttttttctatcacttttgtgttcagaatataacctttgtgtgcgtgtatgttgtgtgtgtgcatgtgtggcgtatatgtgtgttacaggttaatgccttcttggaattgtgttaatgttctcttggtttattatgccatcagaatggtaaatgagaacactacaactgtagtcagctcacaatttt

SEQ ID NO: 595 - DNA, 460 bp, homo sapiens
taaccccaggaagtaccttcgcagtgtaggagatggagagactgtggagtttgatgttgttgaaggagaaaagggtgcggaggcagcaaatgttacaggtcctggtggtgttccagttcaaggcagtaaatatgcagcagaccgtaaccattatagacgctatccacgtcgtaggggtcctccacgcaattaccagcaaaattaccagaatagtgagagtggggaaaagaacgagggatcggagagtgctcccgaaggccaggcccaacaacgccggccctaccgcaggcgaaggttcccaccttactacatgcggagaccctatgggcgtcgaccacagtattccaaccctcctgtgcagggagaagtgatggagggtgctgacaaccagggtgcaggagaacaaggtagaccagtgaggcagaatatgtatcggggatatagaccacgattccgcagg

SEQ ID NO: 596 - DNA, 514 bp, homo sapiens
gagtggtttgtggattccctcaaccagaagatggaggtgcagcgccggccctggttagtgaagtacggggacagcggggagcagattgccggcttcgtgaaggagttctcccacatcgcctttctcacgatcaagggcgccggccacatggttcccaccgacaagcccctcgctgccttcaccatgttctcccgcttcctgaacaagcagccatactgatgaccacagcaaccagctccacggcctgatgcagcccctcccagcctctcccgctaggagagtcctcttctaagcaaagtgcccctgcaggcgggttctgccgccaggactgcccccttcccagagccctgtacatcccagactgggcccagggtctcccatagacagcctgggggcaagttagcactttattcccgcagcagttcctgaatggggtggcctggccccttctctgcttaaagaatgccctttatgatgcactgattccatcccaggaacccaacagagctcagga

SEQ ID NO: 597 - DNA, 185 bp, homo sapiens
aggagattttccttcgggagttgatctctaatgcttctgatgccttggacaagattcgctatgagagcctgacagacccttcgaagttggacagtggtaaagagctgaaaattgacatcatccccaaccctcaggaacgtaccctgactttggtagacacaggcattggcatgaccaaagctgat

SEQ ID NO: 598 - DNA, 277 bp, homo sapiens
aagaggggcctgatgagactccactcaggtgcacacatcaccaggtgcatctgcaggcaccgggctggctgcttgcagccaggagaaggtcagcgagaaggagtgtatgagtgtgagtgtgtgtgcatggaagttggggcactgggcgtctgactccctccccacccaagagaggaaggacccctcaccacccccactggcgagacagtttactttgccgacttgccatgtttttgccaaaaccaagattttgaaggaaatgagtggccagcgccag

SEQ ID NO: 599 - DNA, 339 bp, homo sapiens
atcagcttgacccgattcagagagaacctgtgtgctcagctcttaacagtgcaatattagaaacccacaatctgccaaagcaacctccacttgccctagcaatgggacaggccacacaatgtctaggactgatggctcgatcaggaattggatcctgcgcatttgccacagtggaagactacctacattagctatgcatttcaagagctcacacttatattgtggcatatagtcaacatggaagtagaccagctctgctgatttgaaatttagattttttaaattatgtactggggacaggtttttgtcgctttacattgcttcctagtttacagcatg

SEQ ID NO: 600 - DNA, 515 bp, homo sapiens
gaactcgagattcacctttcgtttccctttccccaaaagtagcgtaaccaacatttaagcttgcttaaaaacgaaaaccaaccgccttgcatccagtgttcccgatttactaaaataggtaaccaggcgtctcacagtcgccgtcctgtcaagagcgctaatgaacgttctcattaacacgcaggagtaccgggagccctgaaccgcccgctgctcggcggatcccagctgcggtggcgacggcgggaaggcgctttccgctgttcctcagcgggccgggcccttgaccagcgcggcccgcaggtcttccttctcgccgtcttgcagttgaagagctacatacgtagtcagtttcgatttgttacagacgttaacaaattcctttacccaaggttatgctatgacctttccgcagtttactttgattttctatgtttaaggttttggttgttggtagtagccgaatttaactggcactttattttacttctaaccttgtttcctgacggtgtaca

SEQ ID NO: 601 - DNA, 574 bp, homo sapiens
  misc_feature (334)..(334): n is a, c, g, or t
  misc_feature (348)..(348): n is a, c, g, or t
  misc_feature (363)..(364): n is a, c, g, or t
  misc_feature (374)..(374): n is a, c, g, or t
  misc_feature (381)..(381): n is a, c, g, or t
  misc_feature (389)..(389): n is a, c, g, or t
  misc_feature (396)..(396): n is a, c, g, or t
  misc_feature (403)..(404): n is a, c, g, or t
  misc_feature (413)..(413): n is a, c, g, or t
  misc_feature (440)..(440): n is a, c, g, or t
ggtgccaatattgacctggactcccagaggaagggcaagtgtgctgtgatcaaaacctctacacgacagacgtacttccttcctgtgattgggttggtggatgctgaaaagctaaagccaggagacctggtgggtgtgaacaaagactcctatctgatcctggagacgctgcccacagagtatgactcgcgggtgaaggccatggaggtagacgagaggcccacggagcaatacagtgacattgggggtttggacaagcagatccaggagctggtggaggccattgtcttgccaatgaaccacaaggagaagtttgagaacttggggatccaancctccaaaaggggntgctgatgtatgggnncccccagggnacggggnaagacccntcctggncccgggnncctgtgccngcacagactaaggccaccttcctaaangctggctggcccccagctggtgcagatgttcattggagatggtgccaagctagtccgggatgcctttgccctggccaaggagaaagcgccctctatcatcttcattgatgagttggatgccatcggcaccaagc

SEQ ID NO: 602 - DNA, 96 bp, homo sapiens
agaaaggatcgtgtgctgcatctcctccttggcgcctcattgctgtaattttgggaatcctatgcttggtaatactggtgatagctgtggtcctgg

SEQ ID NO: 603 - DNA, 499 bp, homo sapiens
cgagcccggttctggggcgaaaatgcctgcccttcacatcgaagatttgccagagaaggaaaaactgaaaatggaagttgagcagcttcgcaaagaagtgaagttgcagagacaacaagtgtctaaatgttctgaagaaataaagaactatattgaagaacgttctggagaggatcctctagtaaagggaattccagaagacaagaacccctttaaagaaaaaggcagctgtgttatttcataaataacttgggagaaactgcatcctaagtggaagaactagtttgttttagttttcccagataaaaccaacatgctttttaaggaaggaagaatgaaattaaaaggagactttcttaagcaccatatagatagggttatgtataaaagcatatgtgctactcatctttgctcactatgcagtcttttttaagagagcagagagtatcagatgtacaattatggaaataagaacattacttgagcatgacacttcttt

SEQ ID NO: 604 - DNA, 550 bp, homo sapiens
  misc_feature (466)..(466): n is a, c, g, or t
  misc_feature (492)..(492): n is a, c, g, or t
  misc_feature (503)..(503): n is a, c, g, or t
agggacctctcttgcatgaagggtgcagtgatagttcctccccactgccccactgtgctcctgggcctgtgaccccagtgctcaggcaccttgcagtagaggcttctgactcctggagctttgtggcttaccagagatgcagtccctcccaggaacctgttggagaggcaggacctgctgctttagaggagtgcagctgaacctcggccctgcgactctgtttggccagagcaaggatctggcctggagaggcccatcctacaccccttattagagccgtgatagcctacagagtgaggtgaggttctcccgccttcccaggtggtttctttctgccacttcctggaaagaaaggtgaggctgccagtagcccactagcaccagccagacctcacgcttgaccaacctctcggggccagaggttcattcctggggcactgtggcctggttttgttttgaaaccaanagagggcaaagggaacccagcagttntgagtgagttntagccagccctacctcaggctggctgttgagagattttacaattttc

SEQ ID NO: 605 - DNA, 504 bp, homo sapiens
ggtgttatttctgaccagagccctagttctgcaataaccaaaaccaaggagtataaataacaatcaggctctgggggaatagaaagcaggctttagacaatctgtccatttctacagtaaaattggagtgagtgtgtatatctacttaaaacttaatagaagtgacttctactttttgggctattccagaagtattttaaaattattatttaaaattttgaagccccatttcaaatcttgccgaccttagttcaaagccccctgagagatcacttttagaattgaggatttgttaaaatggcaagtcatttcatttgtgttaaaaagaaaatacccaaaaggaaggagggagccctgtttgccttgagataaacggccttggcattttctggcattaatgtagaaataatgttcctatgatgacatattttcaaagaaacactttcttatttactgtgtggtgtaaaatgttgctaaatgtgttgttacattatgtcactgctg

SEQ ID NO: 606 - DNA, 544 bp, homo sapiens
  misc_feature (95)..(95): n is a, c, g, or t
tgccctcgttcctaaacttgtgaaggaagaagtgttctggaggaactacttttaccgcgtctccctgattaagcagtcagcccagctcacggccntggctgcccaacagcaggccgcagggaaggaggagaagagcaatggcagagagcaagatttgccgctggcagaggcagtacggcccaaaacgccacccgttgtaatcaaatctcagcttaaaactcaagaggatgaggaagaaatttctactagcccaggtgtttctgagtttgtcagtgatgccttcgatgcctgtaacctaaatcaggaagatctaaggaaagaaatggagcaactagtgcttgacaaaaagcaagaggagacagccgtactggaagaggattctgcagattgggaaaaagaactgcagcaggaacttcaagaatatgaagtggtgacagaatctgaaaaacgagatgaaaactgggataaggaaatagagaaaatgcttcaagaggaaaattagctgttcctgaaatagaagaataatccttaacagtctgcaaac

SEQ ID NO: 607 - DNA, 499 bp, homo sapiens
tttgtggagccgctgcttaacttcatctggttcctgctgctggctgtggacggtgggaagctgacggtgttcactgtgctgtgtgagcagtaccagccatccctccggcgggaccccatgtacaacgagtacctcgaccgcataggacagctgttcttcggcgtcccgcccaagcagacgtcttcctacgggggcctgctcgggaaccttctgaccagcctcatgggctcctcagagcaggaggatggggaggagagccccagcgacggcagccccatcgagctggactgaactggccaggccacgtggagacaccacggtcgacgacggctggagggacgtttcagaggcgagtcctgggtggctcctcgccttgggggctcctggccctgaggctggcggtggccgcatgccggcgcgtgtctgtttctgtgcggcggctcagggtggcgcggctgctgctcactgtgctgctgggacccaagagtggggcgtcgcc

SEQ ID NO: 608 - DNA, 530 bp, homo sapiens
tcatcttcacgtgccatgtgtgctgaaggcccagggcccagcagggggcagtggcacctgttgacggaaaaggccgaggtgcttaccagtggaccttctggcccgcccctcccctgtcacttgtcgggcatccagggccccgacctgtgcctagccgccagggtgacagaaggcagaactgaagcggggtctgggccacgggccaggccactgccttttgtcctcagtgaccatacattcctgctctcggacttgaactctactgtaactgttttcttgaaatgaagctgtacaggacgattcactgccatgccagtcaggcgggcttgccatgttctgtgaatctcgagtgagcggtgccacccgcccccatacctccgccaccggccgctgtcggggatgccacagcctgccacggtcgcagccagacgtgagcttggcattgaagttgcaaagcggcccctggccgggctcgccgtcgctgtccagggccgtgtccggtgctgtggctgtaaagctgtaggaccctt

SEQ ID NO: 609 - DNA, 462 bp, homo sapiens
  misc_feature (304)..(304): n is a, c, g, or t
ggtactatgttagccccataattttttttttccttttaaaacacttccataatctggactcctctgtccaggcactgctgcccagcctccaagctccatctccactccagattttttacagctgcctgcagtactttacctcctatcagaagtttctcagctcccaaggctctgagcaaatgtggctcctgggggttctttcttcctctgctgaaggaataaattgctccttgacattgtagagcttctggcacttggagacttgtatgaaagatggctgtgcctctgcctgtctcccccaccnggctgggagctctgcagagcaggaaacatgactcgtatatgtctcaggtccctgcagggccaagcacctagcctcgctcttggcaggtactcagcgaatgaatgctgtatatgttgggtgcaaagttccctacttcctgtgacttcagctctgtttta

SEQ ID NO: 610 - DNA, 551 bp, homo sapiens
  misc_feature (158)..(158): n is a, c, g, or t
  misc_feature (516)..(516): n is a, c, g, or t
agtcagtgttgtcttaatatccttgataatgctgtaaagtttatttttacaaatatttctgtttaagctatttcacctttgtttggaaatccttcccttttaaagagaaaatgtgacacttgtgaaaaggcttgtaggaaagctcctccctttttttnctttaaacctttaaatgacaaacctaggtaattaatggttgtgaatttctatttttgctttgtttttaatgaacatttgtctttcagaataggattctgtgataatatttaaatggcaaaaacaaaacataattttgtgcaattaacaaagctactgcaagaaaaataaaacatttcttggtaaaaacgtatgtatttatatattatatatttatatataatatatattatatatttagcattgctgagctttttagatgcctattgtgtatcttttaaaggttttgaccattttgttatgagtaattacatatatattacattcactatattaaaattgtacttttttactatgtgnctcattggttcatagtctttattttgtcctttgaa

SEQ ID NO: 611 - DNA, 179 bp, homo sapiens
gatccagttctcgtaagctgcgactcggcgccctgtactgtggtgcagtgtgacctgcaggagatggcgcgcgggcagcgggccatggtcacggtgctggccttcctgtggctgcccagcctctaccagaggcctctggatcagtttgtgctgcagtcgcacgcatggttcaacgtgtc

SEQ ID NO: 612 - DNA, 408 bp, homo sapiens
gtaaaccacatcttttttgcactttttttataagcaaaaacgtgccgtttaaaccactggatctatctaaatgccgatttgagttcgcgacactatgtactgcgtttttcattcttgtatttgactatttaatcctttctacttgtcgctaaatataattgttttagtcttatggcatgatgatagcatatgtgttcaggtttatagctgttgtgtttaaaaattgaaaaaagtggaaaacatctttgtacatttaagtctgtattataataagcaaaaagattgtgtgtatgtatgtttaatataacatgacaggcactaggacgtctgcctttttaaggcagttccgttaagggtttttgtttttaaacttttttttgccatccatcctgtgcaatatgccgtgta

SEQ ID NO: 613 - DNA, 252 bp, homo sapiens
aattccaaggccaagtcctgcaggactggttgggtctggggatctatggcatccaagacagtgacactctcatcctctcgaagaagaaaggagaggctctgtttccagccagttagttttctctgggagacttctctgtacatttctgccatgtactccagaactcatcctgtcaatcactctgtcccattgtctactgggaaggtcccaggtcttcaccagttttacaatgagttatcccaggccagacgt

SEQ ID NO: 614 - DNA, 531 bp, homo sapiens
ggaggcagtgaagggcttgccctgctggcctctcatcccccttcttcccacaacccttgggcagggctggactcagtaattttgaggaaattgaagatgccatcttcccctgtgagtgacatgtctttaattttttaaaaaactactatttgaaaattggagggggaagaatgggaagggagttattgccaaatatgttaaatatgggttggggtgcttgtatatgtatcttcctcaatttccccataaatgaggtatctttttgtcacaccaaaatcaaggggtagggagagggaggaggttgcaaaaagccagatgtggggaaaagtaacatcaacactgtcccatcctcagccctgaactagctaccatctgatcccctcagacattctcaggattttacaagactgtcagagtggggaacccctcccattaaagatccgggcaggactgggacaggttggaagtgtgatgggtgggggggtgggaggcatgggccggggggctagttctctcctcacttgtaaactt

SEQ ID NO: 615 - DNA, 544 bp, homo sapiens
tggaccccaaacagctggtcaccaacgcctgcctcataaaggaggtggacatctataccgtcaaggtggaagacctgaccttcacctccccgttctgcctgcaagtgaagcggaatgactacgtgcacgccctggtggcctacttcaacatcgagttcacacgctgccacaagaggaccggcttctccaccagccccgagtccccgtacacgcactggaagcagacggtgttctacatggaggactacctgaccgtgaagacgggcgaggagatcttcggcaccatcggcatgcggcccaacgccaagaacaaccgggacctggacttcaccatcgacctggacttcaagggccagctgtgcgagctgtcctgctccaccgactaccggatgcgctgaggcccggctctcccgccctgcacgagcccaggggctgagcgttcctaggcggtttcggggctcccccttcctctccctccctcccgcagaagggggttttaggggcctgggctggggggatggggagggcacatcgtgactgtgtt

SEQ ID NO: 616 - DNA, 515 bp, homo sapiens
tgctgggatgaccagcatcagccccaatgtccagcctctttaacatcttctttcctatgccctctctgtggatccctactgctggtttctgccttctccatgctgagaacaaaatcacctattcactgcttatgcagtcggaagctccagaagaacaaagagcccaattaccagaaccacattaagtctccattgttttgccttgggatttgagaagagaattagagaggtgaggatctggtatttcctggactaaattccccttggggaagacgaagggatgctgcagttccaaaagagaaggactcttccagagtcatctacctgagtcccaaagctccctgtcctgaaagccacagacaatatggtcccaaatgactgactgcaccttctgtgcctcagccgttcttgacatcaagaatcttctgttccacatccacacagccaatacaattagtcaaaccactgttattaacagatgtagcaacatgaaagacgctatgttacaggttaca

SEQ ID NO: 617 - DNA, 415 bp, homo sapiens
gacgggaaagtgaagcccagccggaccatccggccgttggccctgcccagtaagcgccaggtggtggcagcagggactcggtgcagcatggccggctgggggctgacccaccagggcgggcgcctgtcccgggtgctgcgggagctggacctccaagtgctggacacccgcatgtgtaacaacagccgcttctggaacggcagcctctcccccagcatggtctgcctggcggccgactccaaggaccaggctccctgcaagggtgactcgggcgggcccctggtgtgtggcaaaggccgggtgttggccggagtcctgtccttcagctccagggtctgcactgacatcttcaagcctcccgtggccaccgctgtggcgccttacgtgtcctggatcaggaaggtcaccggccgat

SEQ ID NO: 618 - DNA, 210 bp, homo sapiens
aaggatatacctatgccagcttctatagctgcacctgctttattggcaggtcacttgccacaattgcatctgccctctaaactttttaattttcacactgtatcctagacatgaatgcataaaatacagtgtctggcgggataatgcagagaggtaccatcttgattttccccagttacattcacctggtctggtctctgtaagcttaga

SEQ ID NO: 619 - DNA, 259 bp, homo sapiens
tggttcacaccccggaaacaagtgtctgagtggctgggcggggccggcaggcacagggaggaggtacagaagccggcaacgcttgctatttattttacaaactggactggctcaggcagggccacggctgggctccagctgccggcccagcggatcgtcgcccgatcagtgttttgagggggaaggtggcggggtgggaaccgtgtcattccagagtggatctgcggtgaagccaagccgcaaggttacaaggcatcct

SEQ ID NO: 620 - DNA, 271 bp, homo sapiens
agttgcagacaagatccagctcatcaataatatgctggacaaagtcaatgagatgattattggtggtggaatggcttttaccttccttaaggtgctcaacaacatggcggtaggaaacaaatgccaagtggatgtgaaatagctctccatgataatagcagattggcacttctctgtttgatgaagagggagccaagattgtcaaagacctaatgtccaaagctgagaagaatggtgtgaagattaccttgcctgttgactttgtcactgc

SEQ ID NO: 621 - DNA, 375 bp, homo sapiens
gcagagacctgtgcccagagaagggtctcgacccactcaaggacacacagcaggtccgtggatgggctggatgagtgaccagggccagcctctgtctcaggacattccagaaggacaaggagatgtctctccctctcccaaagcaccagcgtccctgcctcccgtgggccctgtccgggttgcccctggtgaccccagcctctgtccacttcctaacccagggaccctgcacagccagaactgcctttggccctacggatggccactggctctggtctaaagtgcctgggcttggtggccatcaagagggagccagtcaggcctgtgagggccgtagaccttgtatataccctgcaccagcagtgaccgggcaga

SEQ ID NO: 622 - DNA, 420 bp, homo sapiens
  misc_feature (40)..(40): n is a, c, g, or t
  misc_feature (168)..(168): n is a, c, g, or t
  misc_feature (269)..(269): n is a, c, g, or t
ggctccacttggcgcatgggagatacgtgctgggtctgtngggccgtggcccggtggccaggcgagctcttctccagcacgttcagccgggcctccagcttggagatggcctgctgcagctcctgtaccacgccacgcagactctggttctccacttccagactggcnatccggacgacgagctcaccgtggtctccgctggtgccgctggaggccccggggcctgagcttccagccagggatttctggatgttctctctggctctcgncaatgtcacggaggatcacgctggcgccgttctcctggcgggaggcacctgccacaggcccgttcatctgctcgtagaatctcctttctgcgtcgtcatatttgaacttgtcgaaccagatcttctcatgtgctaggaagtttgtagccat

SEQ ID NO: 623 - DNA, 486 bp, homo sapiens
  misc_feature (62)..(62): n is a, c, g, or t
  misc_feature (66)..(66): n is a, c, g, or t
gcctacttgtgattcaaatcttcagagttttcctagttcttctagaaatacatgtcaggttngttngttcatcctttctgtcagcatggatcaagcccctaaaatgtggtaagtgttgtcagagcagggcaatatctctactctcaagtatgaggggaatagaaacaaagcagcagttttagccagggttcaatgatagagtggaggtaaattaagagcctccaggctgtgattcaccatttgagacattatacataatttgtttttgttataagccatttgaatttttaaaaaatttcatacatgcaatggaatatagatatgtatatacacatataatatatatgctaaagtataaagagtaataataatgacaataaacaaacccctgtgtgcctaccacccaccttattgcctttcctttgaggtaccgtgtgcggtttcctgaacctatctctatccctgtctgatagagggaacccctgt

SEQ ID NO: 624 - DNA, 341 bp, homo sapiens
  misc_feature (70)..(70): n is a, c, g, or t
cacacaccatagtacacacgaaaatgtgcagatctgtaacatttttttcacagctgataaaaaaaaaaantactaccattctcccccagactcccctttgatacagtaggtaaacaaaatagattttttttccacaaatatcagcagacactttctggcaccccacactgtattggcatcagtgttaacagtcccagttcagatgtgcaatacttcagattggatacactgtaacaagaatccaactttgcatagacatcctcagaatcgcaatcagtcatggggttgcccttccaagctggcagaaaaggaacccgatcttaatttccagctactcctgg

SEQ ID NO: 625 - DNA, 510 bp, homo sapiens
  misc_feature (93)..(100): n is a, c, g, or t
  misc_feature (105)..(113): n is a, c, g, or t
  misc_feature (147)..(147): n is a, c, g, or t
  misc_feature (284)..(284): n is a, c, g, or t
  misc_feature (294)..(294): n is a, c, g, or t
gtctttcaagctggccttatgacagcttttcttaacgtttctgcggacattttggcggacttgtgtcggcctagctcagtgatcagtttcgtnnnnnnnntaaannnnnnnnngaatttgagtatccgaacattaaaggattggacntaaattctagcaggaggatttttagccacatcaaataatttacgtctcaaagatttagataattagggtaaggatgcttagtaaaacctgaaggttccatcgcgccactgcactccaacctgggcgacagagcgagnctccgtctcnaaaaaaaaaacaaacaaaaaaaaacctgaaggttcctggaggaaagagatgaactattagccgtgtatttcggtgggaccacctcaacataggttcctgtaggttagcaatgtagaaatgtagcgcttcaaagccggagcatcctgtcttcaaagagcatgaaggtatcaacggcattcattgtcgattaataataaccttcctggtactttcttg

SEQ ID NO: 626 - DNA, 539 bp, homo sapiens
ggctggagcgggacttgagcaacaagaaaatctaccaagaggaggagatgcccgaatcgggcgcgggcagtgagttcaaccgcaagcttcgggaggaggctcggaggaagaagtacggcatcgtcctcaaggagttccggcccgaggaccagccctggctgctccgggtcaacggcaaatcaggcaggaagttcaagggcatcaagaagggaggcgtaacagagaacacgtcctactacatcttcacccagtgccccgacggggccttcgaggccttccccgtgcacaactggtacaatttcacaccgctggcccggcatcgcacgctcactgccgaggaggccgaggaggagtgggagaggaggaacaaggtgctgaaccacttcagcatcatgcagcagcggcggctcaaggatcaggaccaggacgaggatgaggaggagaaggagaaacgtggccgcaggaaggcgagcgagctgcgcatccacgacctggaggacgacctggagatgtcgtccgatgccagtgatgccagtggt

SEQ ID NO: 627 - DNA, 392 bp, homo sapiens
gcacagtgggcatgcgcaacattagaggaaggtgggctttataccggaaaaggttttcctgcgtctggaccagaagatttttaatacgattatttacagccacttcagacgaaaaaccaagtgatataatacaaaaatgctcaggaggcgacaggactaaccacttttacactttgatctttccttctaggctgtacattattttttcagtgttagctggtgagtcaaattcattttttaaaacccgggacacatgttccacgtggcaaggcttccataaaaacatttggtgaacgaataaagtaacaaaaacttacagttcagactctcaaattgctatcatgtcttttgaaggaccggcatacattaagctaaggcttccctcagaaaaa

SEQ ID NO: 628 - DNA, 437 bp, homo sapiens
cagactctctggccaggcaaatccaaattccttcaggacgggttcacagcgtctcttgactgaaagacacatgccgccgcatgggccaatggggatgttgatcttctctgtgcacattggcacataaacagaacaaaggaagaactggaaaagtaacaaaatgaacacacacaaaaaaaacaatgacttggaagtttgaccaaatgctcccacaaagctgagttgaatgcttccaggcaatctaggtatctacttttaaaccaacctatcgggagtctgtctgtttactctgacctcaaacaagggcgcctgataatccatcacttacatacttttcttagtttggctttagtaatcctttccagaagaatgtacataaataaataaataaaataaatagggtctgaagaattgcataagccctctttgcacaacac

SEQ ID NO: 629 - DNA, 526 bp, homo sapiens
tgtgggagtcttgggtactcgcacctcttggctttgttgatgctccgccaggaaggccacttgtgtgtgcgtgtcagttacttttttagtaacaattcagatccagtgtaaacttccgttcattgctctccagtcacatgcccccacttccccacaggtgaaagtttttctgaagtgttgggattggttaaggtctttatttgtattacgtatctccccaagtcctctgtggccagctgcatctgtctgaatggtgcgtgaaggctctcagaccttacacaccattttgtaagttatgttttacatgccccgtttttgagactgatctcgatgcaggtggatctccttgagatcctgatagcctgttacaggaatgaagtaaaggtcagttttttttgtattgattttcacagctttgaggaacatgcataagaaatgtagctgaagtagaggggacgtgagagaagggccaggccggcaggccaaccctcctccaatggaaattcccgtgttgcttcaaactgag

SEQ ID NO: 630 - DNA, 265 bp, homo sapiens
ttgactgccgtgtgtgactccagtcggcgtctcaacagtctccggtgtccacgcgttgactgccgtgtgtgactccagtcggcgtctcaacagtctccggtgtccacgcgttgactgccgtgtgtgactccagtcggcgtctcaacagtctccggtgtccacgcgttgactgccgtgtgtgactccagtcggcgtcttaacagtctccggtgtccatgcgttgactgccatgtatgactccaggtattgagttcatcttcaactt

SEQ ID NO: 631 - DNA, 288 bp, homo sapiens
ctgccagctgtcagcaaggcctggggaaccttcagccctggatgcagggccttatcgcggtggccgtgttcctggtcctcgttgcaatcgcctttgcagtcaaccacttctggtgccaggaggagccggagcctgcacacatgatcctgaccgtcggaaacaaggcagatggagtcctggtgggaacagatggaaggtactcttcgatggcggccagtttcaggtccagtgagcatgagaatgcctatgagaatgtgcccgaggaggaaggcaaggtccgcagcaccc

SEQ ID NO: 632 - DNA, 525 bp, homo sapiens
tttcttgacctatgccttttcttagaaagtttgatagattagttagaacttcagatcatcagatcagtctcaaatgggtttcttggaattttatatttgacaatatttatactataccaaactcatttgcagttcttaggtttgttggttaaaacatttttttaaagcagtaagtttatagaaaatgttttcatttaatggaaggctggggaatgtccagcatcaacccctatggcatgcattcccagtggccttctcatctgggcctggaacctttggttcagggcttaggggagaacaggccacatggcaacagccacacagtcattgccttcaacacagagccacgtgtccccaaacagcaatagtcatgcccttgtccaggctgggatctaattgatacaataggtcgttgactccctcctagtagagctatctaggtttgtctggaaagtttccgaccctggcttataggcaccacacctcatgtactcctcatggcttggatctctgtattcagccttt

SEQ ID NO: 633 - DNA, 472 bp, homo sapiens
ttttccagccacacgcaaacatgctctgtaatttcacattttaaaccttcccttgacctcacattcctcttcggccacctctgtttctctgttcctcttcacagcaaaaactgttcaaaagagttgttgattactttcatttccactttctcacccccattctcccctcaattaactctccttcatccccatgatgccattatgtggcttttattagagtcaccaaccttattctccaaaacaaaagcaacaaggactttgacttctcagcagcactcagctctggttcttgaaacacccccgttacttgctattcctcctacctcataacaatctccttcccagcctctactgctgccttctctgagttcttcccagggtcctaggctcagatgtagtgtagctcaaccctgctacacaaagaatctcctgaaagcctgtaaaaatgtccatgcatgttctgtgagtgatc

SEQ ID NO: 634 - DNA, 397 bp, homo sapiens
  misc_feature (87)..(87): n is a, c, g, or t
  misc_feature (117)..(117): n is a, c, g, or t
  misc_feature (127)..(127): n is a, c, g, or t
  misc_feature (159)..(159): n is a, c, g, or t
cccccatgagaccgttagtctctctttgcctggctgactacctgcatacagtaggcactcactgctggagtgaggcactgactcctnccaaagattgcagggggcggaggagggaanccacgaaggncctgggagggggcatctttggcccccactaanccatctccctatttctgcatcctggtgaccgtcagcaagagatgagtcggggagaccctctcctggagttctagcccctaattctgggctttctatatgagaggacatgcagatagggaagaaactaaaacctttcaatgtcttccttttttctttaaaagtgtttcctcaaaccatccccgtcccaaagaggccgccttgggcaagtgcatgggagcccggaagtggaactgaccag

SEQ ID NO: 635 - DNA, 457 bp, homo sapiens
cagctgcggtgagtgttgcttcttgcctgatgggacttctttggtgttgctgctcctcccttggttggggttttctagagccctgagcgccctcacactgaggtcagcgctgttatctgtgagaagaagctgtgtcaggctctggtgacacacacttcaccctgccaagccccccagtaactgctgtggaccaggcagcaagaagatttgccctgagcggcgcaaggggcaggacccatggctggggctccacactcagggtgtctggctccttcattaggtgatggcttcgccgattcactctcacttgctctccttttcctgtttcttgggcctctcctcgcctggccacctgaccaaaagattgctttatgtgatgtgattcatgtaacaagtgcttctgccttaaacccagagtctgtgccttggctcacgcctgtgatcctaacatttcaag

SEQ ID NO: 636 - DNA, 179 bp, homo sapiens
atgctaactataacattttttgtgaatactttgaatgtttcctaacagttgtgatgttactgttccgttttatgctcttattccaagttcatttttaatggtttggaagccatttttgtaatgaataaatgttcatgctgtacagtatctgtagcatgccgttctggattaataaaagc

SEQ ID NO: 637 - DNA, 534 bp, homo sapiens
  misc_feature (486)..(493): n is a, c, g, or t
agtattgacaactgcacatgaaagttttgcaaagggaaacaggctaaatgcaccaagaaagcttcttcagagtgaagaatcttaatgcttgtaatttaaacatttgttcctggagttttgatttggtggatgtgatggttggttttatttgtcagtttggttgggctatagcacacagttatttaatcaaacagtaatctaggtgtggctgtgaaggtattttgtagatgtgattaacatctacaatcagttgactttaagtgaaagagattacttaaataatttgggtgagctgcacctgattagttgaaaggcctcaagaacaaacactgcagtttcctggaaaagaagaaactttgcctcaagactatagccatcgactcctgcctgagtttccagcctgctagtctgccctatggatttgaagtttgccaaccccaacaattgtgtgaattaatttctaaaaataaagctatatacagccannnnnnnntatttgtgggggatttgtttcaggatctctacagataccaa

SEQ ID NO: 638 - DNA, 487 bp, homo sapiens
  misc_feature (400)..(400): n is a, c, g, or t
gacctcctcccaaagatactggtattgctcgagttccacttgctggagctgccgggggcccagggatcggcagggctgctggcagaggaatcccagctggggttcccatgccccaggctcctgcaggacttgctgggccagtccgtggggttggcgggccatcccaacaggtgatgaccccacaaggaagaggtactgttgcagccgctgcagctgctgccacagccagtattgccggggctccaacccagtacccacctggccgtgggggtcctcccccacctatgggccgaggagcaccccctccaggcatgatgggcccacctcctggtatgagacctcctatgggtcccccaatggggatcccccctggaagagggactccaatgggcatgccccntccgggaatgcggcctcctccccctgggatgcgagggccccctcccccgggaatgcgcccaccaaggccctagactcatcttggccc

SEQ ID NO: 639 - DNA, 553 bp, homo sapiens
gatctacttgtgacttgttggccttcttcccacatctgcctcagactggggggggctcagctcctcgggtgatatctagcctgcttgtgagctctagcagggataaggagagctgagattggagggaattgtgttgctcctggaggaagcccaggcatcattaaacaagccagtaggtcacctggcttccgtggaccaattcatctttcagacaagctttagagaaatggactcagggaagagactcacatgctttggttagtatctgtgtttccggtgggtgtaataggggattagccccagaagggactgagctaaacagtgttattatgggaaaggaaatggcattgctgctttcaaccagcgactaatgcaatccattcctctcttgtttatagtaatctaagggttgagcagttaaaacggcttcaggatagaaagctgtttcccacctgtttcgttttaccattaaaagggaaacgtgcctctgccccacgggtagagggggtgcacgttcctcctggttccttcgcttgtgtttctgtacttacca

SEQ ID NO: 640 - DNA, 395 bp, homo sapiens
cctcctccagggtgattttatgatcagtgttgttgctctaggaagacatttttccgtttgcttttgttccaatgtcaatgtgaacgtccacatgaaacctacacactgtcatgcttcatcattccctctcatctcaggtagaaggttgacacagttgtagggttacagagacctatgtaagaattcagaagacccctgactcatcatttgtggcagtcccttataattggtgcatagcagatggtttccacatttagatcctggtttcataacttcctgtacttgaagtctaaaagcagaaaataaaggaagcaagttttcttccatgattttaaattgtgatcgagttttaaattgataggagggaacatgtcctaattcttctgtcctgagaa

SEQ ID NO: 641 - DNA, 497 bp, homo sapiens
gtatggtacattcttctcttactcctttctcagtgcaagtgactaacattcaagattggtctctcaaatcggagcactggcatcaaaaagaactgagtggcaaaactcagaatagtttcaaaactggagttgttgaaatgaaagacagtggctacaaagtttctgacccagagaacttgtatttgaagcaggggatagcaaacttatctgcagaggttgtctcactcaagagacttatagccacacaaccaatctctgcttcagactctgggtaaattactactgagtaagagctgggcatttagaaagatgtcatttgcaatagagcagtccattttgtattatgctgaattttcactggacctgtgatgtcatttcactgtgatgtgcacatgttgtctgtttggtgtctttttgtgcacagattatgatgaagattagattgtgttatcactctgcctgtgtatagtcagatagtccatgcgaaggctgtatat

SEQ ID NO: 642 - DNA, 442 bp, homo sapiens
aatggactgactgaaactcgctaaggttaaatctgcatcaaaatctaaccaatttgagcctctgaagggagtgccattggctttatttacttctctcctctgctagtcctgatttggaaacagttaaaagccaatttttagctccagtggaaccatagccacataaaactttaatggacaaccatatagaattaacttattttgtccaagtacagttggcattttccagaataattttaccaccctgctagatgtcatctctggattgcacatggatgatgaaggaactcagcattgaaagttgggggattagtaaccttgttacaacggtttctttttcattttagcctattttaatggctattggtaagatactgtatgtttttagtatctcatccagtgcttagaagaaagaatggtttataattcccagtacatgttt

SEQ ID NO: 643 - DNA, 403 bp, homo sapiens
tcagtgccatgttcgacttcagcgagaagctcaactccctggcgcttaccgaggaggagctgggcctcttcaccgcggtggtgcttgtctctgcagaccgctcgggcatggagaattccgcttcggtggagcagctccaggagacgctgctgcgggctcttcgggctctggtgctgaagaaccggcccttggagacttcccgcttcaccaagctgctgctcaagctgccggacctgcggaccctgaacaacatgcattccgagaagctgctgtccttccgggtggacgcccagtgacccgcccggccggccttctgccgctgcccccttgtacagaatcgaactctgcacttctctctcctttacgagacgaaaaggaaaagcaaaccagaatcttatttata

SEQ ID NO: 644 - DNA, 450 bp, homo sapiens
gaacatcgagccaaggcacctgtgccgtcagacgttgcctagcgttagaagcgagctggaatgcgtgaccaacatcaccctggcaaatgtcatccgacagctgggcagcctgagtaaatatgcagaggacatttttggagagctctttactcaggcaaatacctttgcctctcgggtaagctcccttgctgagagggtcgaccgactacaggttaaagtcactcagctggatcccaaggaagaagaagtgtcactgcaaggaatcaacacccgaaaagccttcagaagttccaccattcaagaccagaagctttttgacagaaactctctcccagtgcctgtcttagaaacatacaatacctgtgatactcctccccctctcaacaatcttaccccttacagggacgatggaaaagaggcactcaaattctacacagacccttcatactt

SEQ ID NO: 645 - DNA, 563 bp, homo sapiens
  misc_feature (69)..(69): n is a, c, g, or t
  misc_feature (79)..(79): n is a, c, g, or t
  misc_feature (99)..(99): n is a, c, g, or t
  misc_feature (102)..(102): n is a, c, g, or t
  misc_feature (106)..(106): n is a, c, g, or t
  misc_feature (114)..(114): n is a, c, g, or t
  misc_feature (122)..(122): n is a, c, g, or t
  misc_feature (145)..(145): n is a, c, g, or t
  misc_feature (172)..(172): n is a, c, g, or t
  misc_feature (175)..(175): n is a, c, g, or t
  misc_feature (177)..(177): n is a, c, g, or t
  misc_feature (207)..(207): n is a, c, g, or t
  misc_feature (220)..(220): n is a, c, g, or t
  misc_feature (228)..(228): n is a, c, g, or t
  misc_feature (232)..(232): n is a, c, g, or t
  misc_feature (251)..(254): n is a, c, g, or t
aagtgctccgaacacttgcgttagcctacagttgggcagaatcatttaatgcagagcctattttataantaataaaaantgttattaataatacaaaantangaanaagatcanaatgcaanagtacggtttctactgaatatantattgctttcacaccatcatcaagtcngananaattgtaagtcaaaccatcgtaagtcaggnagtgtctatattngtatatantcgnctatatttgtatggctgtnnnnagaaattaacaaaataatgtctgtgttggtacttggaaaaccgtaaagtgccatggaaatatattgtcttggttatcttcattattctataaattaaagggggcaggtatatatgggagaatatgggagctgatcataatcccagaagacatagtcctgagtgctatcatcctgaatgttggaatcctgaaagatcaaaatcccaaaaatataattctagaaaatctaaaaatgattttgaagaaatttatttaaaaaatttaaaggggatttgagaaacatgtaaaaacatgacaacagcctgggcaa

SEQ ID NO: 646 - DNA, 458 bp, homo sapiens
gcttctcagggaatccgacaccagccaaccattttaagcctctaaaagacctcgggcaagtctcacagaaactgagctgcagacggggagtagctttgtggaaactgatttgatggacactgcaccagcttccttcaggttctagattcttgctacttagggcgggctggtttggacctaacatctcgcacgtgactccctcagcctcagagccttgggatgcagagcagctggcagggttcctctcaatcctgcaaccccagctgtcccaccggtggatgcagaggggaatccgaggccatcaaccttggtgacagcagcgcagtgccaatgctgatcacactgcatgggagattttgttaacgtctgccacccccactctcacccccaagctctaagcccccgggaggcctggactgtcttcctcatctctgtagcaccaagcctgatagatctgt

SEQ ID NO: 647 - DNA, 547 bp, homo sapiens
acttgcccaactggaaagtatcctcaaagaagctgagtccgcttccgaaaacgaagaaattgacatttccaaagctgcacaaactactatagaaactgccattcattctttaattgaaactttgaaaaataaagaatttatatcagctgtagcacaagtcaaagctttcagatctctctggcccagtgatatctttggcagttgtgaagatgaccctgtacagacactgttacatatatatttccatcatcagacgctgggccagacaggaagctttgcagttataggctctaacctggacatgtcagaagccaactacaaactgatggaacttaatctggaaataagagagtctctacgcatggtgcaatcataccaacttctagcacaggccaaaccaatgggaaatatggtgagcactggattctgagacacttcaggcctttaggaaagaaactaaactgaagatgatgaagaatattaaccaagcaccttttatggacccttgcattcactgataactttctggcagcatctactttttagt

SEQ ID NO: 648 - DNA, 299 bp, homo sapiens
  misc_feature (206)..(206): n is a, c, g, or t
tggcctcaggcgtcagaatcttagaacgtctcaggctttttcttctctgttctctggaggcttccctgacctccccgcgttttccatggcgggcttgggtttgggaaaagggaagtaaaaaatcaggctgccccaagtgagatgctggcaactcttgggcctttagatttccaaaacctcattttgagcccttctgcagggtattnccaattaggcgccccctggggccgcgatgacatcttccctgaggatctgaggcaaatgtggtttactcccttgctcgaataaccctggcatat

SEQ ID NO: 649 - DNA, 198 bp, homo sapiens
gtaagtggaagatggcctaattgccaagtgtacagcttcagctcagcatataattgttatggaccccagttatccactcacctaaccgtcagtgccctgtggctcagagcagcagtgaagctaagtaggaggtgaggtttggaaggtgagtgctgtgcagcagtcttggagatcatagttgacagtgccggctctggg

SEQ ID NO: 650 - DNA, 231 bp, homo sapiens
  misc_feature (132)..(132): n is a, c, g, or t
tccagtacctgtgtggatcctcggcgacgttttcttgggggcgtatgtgaccgtcttcgaccgcggggacatgaagagcggcgcacgagtgggactggcgcgcgctcgccctcgcggagcggacctgggaangcgcgagaccgcgcaggcgcagtaccgcgggtgccgcccaggtgatgcgcatgcgcaccgggtagcagagctagcgctactcagtaaaaatccaatatt

SEQ ID NO: 651 - DNA, 534 bp, homo sapiens
ggaacttccaaatgctgagcccagatccaaagttgtctcctgcccacgagcaccacagtcaggtcttgagggggttttctagggagacaacagccctgtctcaaaaccaggttgccagatccaatgaaccagcagctggaatctgaaggcatcagtctgcatcttaggggatcgctcttcctcacaccacgaatctgaacatgcctctctcttgcttacaaatgcctaaggtcgccactgcctgctgcagagaaaacacactcctttgcttagcccacaaggtatctatttcacttgacccctgcccacctctccaacctaactggcttacttcctagtcctacttgaggctgcaatcacactgaggaactcacaattccaaacatacaagaggctccctcttaacacggcacttacacacttgctgttccaccttccctcatgctgttccacctcccctcagactatctttcagccttctgtcatcagtaaaatttataaattttttttataacttcagtgtagctctctcct

SEQ ID NO: 652 - DNA, 463 bp, homo sapiens
  misc_feature (314)..(314): n is a, c, g, or t
  misc_feature (317)..(317): n is a, c, g, or t
  misc_feature (327)..(327): n is a, c, g, or t
ggttcatgaagccgagcagtacaaggctgaggatgaggcccagagggacagagtggctgccaaaaactcgctggaggcccatgtcttccatgtgaaaggttctttgcaagaggaaagccttagggacaagattcccgaagaggacaggcgcaaaatgcaagacaagtgtcgggaagtccttgcctggctggagcacaaccagctggcagagaaggaggagtatgagcatcagaagagggagctggagcaaatctgtcgccccatcttctccaggctctatggggggcctggtgtccctgggggcagcagttgtngcnctcaagcccnccagggggaccccagcaccggccccatcattgaggaggttgattgaatggcccttcgtgataagtcagctgtgactgtcagggctatgctatgggccttctagactgtcttctatgatcctgcccttcagagatga

SEQ ID NO: 653 - DNA, 494 bp, homo sapiens
ggttccagttgtgcttcagacagcccctcattgcctgactgaccgggttgggggcttcctttcatagctacatgatgaaaaccctctgccctggcctcatctaccactgaagcagaaaggagtctgggagcagcagtcttcgtggctggttcagggtgttttgttccgagcctgcctgcctgccggttctatacctcaggggcatttttacaaaaagccccctcccgtcccctccccttggatattaggggtaacgaccgcttgtctttggtctctaaccctaatctctgggcttgccctttgcctcctgcagaactttgaaaagctgggttgagtgaggctatcagcacagccttccttggggactctgaaggtgtccccacgaaggccagaaagggggaaagggacctgggcgaggagaggatttgtggtgcttggaagagccggccttgggtgggccctccaccgcctctaccctcactgggtgggactgc

SEQ ID NO: 654 - DNA, 444 bp, homo sapiens
agcccacctgctggatgaggaacttgaggcaagtcaccagcccctgatcatttcgcctaaaagagcaaggactagagttcctgacctccaggccagtccctgatccctgacctaatgttatcgcggaatgatgatatatgtatctacgggggcctggggctgggcgggctcctgcttctggcagtggtccttctgtccgcctgcctgtgttggctgcatcgaagagcaccttctgtcctggtcccaggcccagggctcctcagagcaggaactccactatgcatctctgcagaggctgccagtgcccagcagtgagggacctgacctcaggggcagagacaagagaggcaccaaggaggatccaagagctgactatgcctgcattgctgagaacaaacccacctgagcaccccagacaccttcctcaacccaggcgggtggaca

SEQ ID NO: 655 - DNA, 478 bp, homo sapiens
ctgtggccacagcagctttgtacacgaagaccatccatcctcccttcgtccaccactctactccctccaccctccctccctgatcccgtgtgccaccaggagggagtggcagctatagtctggcaccaaagtccaggacacccagtggggtggagtcggagccactggtcctgctgctggctgcctctctgctccaccttgtgacccagggtggggacaggggctggcccagggctgcaatgcagcatgttgccctggcacctgtggccagtactcgggacagactaagggcgcttgtcccatcctggacttttcctctcatgtctttgctgcagaactgaagagactaggcgctggggctcagcttccctcttaagctaagactgatgtcagaggccccatggcgaggccccttggggccactgcctgaggctcacggtacagaggcctgccctgcctggccgggcaggaggttctc

SEQ ID NO: 656 - DNA, 283 bp, homo sapiens
  misc_feature (27)..(28): n is a, c, g, or t
  misc_feature (51)..(51): n is a, c, g, or t
gaagtatgcacttaggagtcagttgtnnctgatgaagagacatgcatagantctgggccaactctgggtggggtctgggcttcaagggcaggtggaaggcagcccctccaggtgcctgagggagatcccctgcaggcagacgcaggactcaggactgggctttccagccccactcttcactccattgcaagctaggcagaatacggcctcgatgggcaggaggaatgcctaggctggcagtgcccacaggagtttggcggaccagagccatctgtccatgtgt

SEQ ID NO: 657 - DNA, 272 bp, homo sapiens
ttatggaaacaactggcctcagcccttgcgcccttactgtgattcctggcttcattttttgctgatggttccccctcgtcccaaatctctctcccagtacaccagttgttcctcccccacctcagccctctcctgcatcctcctgtacccgcaacgaaggcctgggctttcccaccctccctccttagcaggtgccgtgctgggacaccatacgggttggtttcacctcctcagtcccttgcctaccccagtgagagtctgatcttgttttt

SEQ ID NO: 658 - DNA, 513 bp, homo sapiens
aactgtcagaaacttctgtgcatgtatttatatttgccagagtataaacttttatactctgatttttatccttcaatgattgattatactaagaataaatggtcacatatcctaaaagcttcttcatgaaattattagcagaaaccatgtttgtaaccaaagcacatttgccaatgctaactggctgttgtaataataaacagataaggctgcatttgcttcatgccatgtgacctcacagtaaacatctctgcctttgcctgtgtgtgttctgggggaggggggacatggaaaaatattgtttggacattacttgggtgagtgcccatgaaaacatcagtgaacttgtaactattgttttgttttggatttaaggagatgttttagatcagtaacagctaataggaatatgcgagtaaattcagaattgaaacaatttctccttgttctacctatcaccacattttctcaaattgaactctttgttatatgtccatttctattcatgtaact

SEQ ID NO: 659 - DNA, 204 bp, homo sapiens
gatacattcgtcagacacaagatcccagtgatggccttggtagggaatgatgctggctggacacagatttctcgggagcaggtgccctctctgggcagcaacgtggcctgtggcctggcctacactgattatcacaaggcagccatgggtctgggggcccggggcttgctgctctcacgggagaacgaggatcaggtggtcaag

SEQ ID NO: 660 - DNA, 567 bp, homo sapiens
ttcccgtgcaaccagtttgggcatcaggagaacgccaagaacgaagagattctgaattccctcaagtacgtccggcctggtggtgggttcgagcccaacttcatgctcttcgagaagtgcgaggtgaacggtgcgggggcgcaccctctcttcgccttcctgcgggaggccctgccagctcccagcgacgacgccaccgcgcttatgaccgaccccaagctcatcacctggtctccggtgtgtcgcaacgatgttgcctggaactttgagaagttcctggtgggccctgacggtgtgcccctacgcaggtacagccgccgcttccagaccattgacatcgagcctgacatcgaagccctgctgtctcaagggcccagctgtgcctagggcgcccctcctaccccggctgcttggcagttgcagtgctgctgtctcgggggggttttcatctatgagggtgtttcctctaaacctacgagggaggaacaccttgatcttacagaaaataccacctcgagatgggtgctggtcctgttgatcccagtctctgccagaccaaggcgagtt

SEQ ID NO: 661 - DNA, 514 bp, homo sapiens
tcctgtttgaagggctctcagatgatgaggatgactttcacccaaacaccaggtccacaccctctagcagtactcccagctcccgcccagcctccctggggtacagtggagctgctgggccccggcccatcacccagagtgagctggccaccgccttggccctggccagcactccggagagcagctctcacacaccgactcctggcacccagggtcattcctcagggacctcaccaatgtcctctggtgtccagtcagggacgcccatcaccaatgatctcttcagccaagccctacagcatgcccttcaggcctctgggcagcccagccttcagagccagtggcagccccagctgcagcagctacgtgacatgggcatccaggacgatgagctgagcctgcgggccctgcaggccaccggtggggacatccaagcagccctggagctcatctttgctggaggagccccatgaactccctgcttcccctgaacccccagcaagttgcagaggct

SEQ ID NO: 662 - DNA, 216 bp, homo sapiens
aagcccaaaggagccttcaaagccttcactggcgagggtcagaaactgggcagcactgccccccaggtgttgagtaccagctctccagcccaacaggcagaaaatgaagccaaagccagctcttccatcttaatcaacgaatcagagcctaccacaaacatccaaattcggcttgcagacggcgggaggctggtgcagaaatttaaccacagccac

SEQ ID NO: 663 - DNA, 310 bp, homo sapiens
tgtgaatgcctgttctattcagatttacctcttagataagttgttccagctaccccgggaaggaggggtaaaggggatgagatgtttgaactgtaacaccctgtacatgggaggaaacaacatgagttgttgatggagcatccttccatcttacctttttggcttttaaaaaactttatgcagtcagaaatattgaaatgttttacaggtttgagcatcccagctctgaaatctgaaatgcccccaaatccaaaactttgagtgctgacatgctgctcaaaggaaaagctcaattgagcattttggattt

SEQ ID NO: 664 - DNA, 396 bp, homo sapiens
ttcctgaagctcttcggctgacagcccgctcggctcgccctctcccccggaggccgcgccctcccggaaaagccgggtcctccagaccccgaggccttgctctcagagcgggaggccccacccactggagagccccgcccctaaggtactatgagttctcaggggtcaagttcagaaacggcccagccagacctaaacccacacgcccacaaagtggattgcacacagacaagaactcccgtgcgggcctccactctattcccacccttgagggagcccccttactgggggagggtccttgcaattccagcgaatcggaggccaggccaggacgtccttgctccctgcaccctcactgttctgtgcactttttctacctacataaacacacgcatt

SEQ ID NO: 665 - DNA, 520 bp, homo sapiens
gaagcaagtttccatgatttctgaagagctggtataggaagtttctttcttccttttgtgttacatgtgcattaaacagaacaagctgtgtgtcatcacagattgtactgtgggctcagaaaccgtgagagagcccccaccgtggacaccggctctatggccacaggaaaaggaacgtttccaggcattttgtctccagggctcccgctggacaggcacgtactgccccggggagtaaatgcggagagttcacgaactgtgcccaacgcatgttatagccagggtcctactaactactcagtaaaagaacgtattgttgtattcctccagtgttaagctatagccatgttaaaagtcactgtgcatttattctcagcatcaaataccttgtaacgtcttctctgccttgttagtgcatatttttacttttctgatactgtaaagaatatatccagtatgtaaatgaatgttctataaatcttttgtatagtcattttctctgctccttaaatatcatctc

SEQ ID NO: 666 - DNA, 277 bp, homo sapiens
gttttacctattcgtaagttggcagttttagatagataacattctggtggtagctagggatttaccttttgtcatccttttcctgcacttctcttgaattcctttatagatgtacagttttgctttaaccactgaagattgctgtaaattataaagggtgtgatagaatccacatggctgtcaagaaggagatcttaccaaggacagttgactgactagtctcagattgtttcatatcatttatacttgggtaagagtaaactagataactgggcgt

SEQ ID NO: 667 - DNA, 187 bp, homo sapiens
gcagacttcacctctgtaagttgagtcctccgcctccgggccaccccactcccttccgcttgcagcttccctgggatttttgtctccttttaaaggcaaacctcccagcttctttagcctcttggtacctcacactctctgtccctcgcgttatttattctacactgccacttctgtaagaaaaaca

SEQ ID NO: 668 - DNA, 567 bp, homo sapiens
agaaggctacggggaggactgagaggacagggctggaggcagccaagtaacgtagtcatatcatcgcgctctgatctggtggcatctggctgtgcaaggaagacccggctttgccctcacaagtcttatgggcaccacagggaacatcctggacttaaaaagccagggcaggccgggcacagtggctcacgcctgtaatcccagcactttgggaggccaaagcaggtggattacccaaggccaggagttcaagaccagcctggccaacatggtgaaaccccgtctctactaaaaaatacaaaaaagctgggtgtggtggcacacacccgtagttccagctacttgggaggctgaggcagcattgcttgaacccgggaggtggaggctgcaatgagctgagatcatgccattgcactccagcctgggcaacgagagtgaaactccgtccccaccccctgccaaaaaaaaaaaaaaaaaagccagggcaaaggacctggcgtggccacttcctcctgccccagcccaacctctgggaacaggcagctcctatctgcaaactgtgttcac

SEQ ID NO: 669 - DNA, 540 bp, homo sapiens
tctgctcaacggccaggtacgagaagaatacaagaggtggatcactgggaagacgaagcccagctcccagtcccagacctcaaggatcttgctgtcctccatgccatccgcttccaagacgggttaaagcctttcttgctttcaaatatgctatggagccacagttgaggacagtagtttcctgcaggagcctaccctgaaatctcttctcagcttaacatggaaatgaggatcccaccagccccagaaccctctggggaagaatgttgggggccgtcttcctgtggttgtatgcactgatgagaaatcagacgtttctgctccaaacgaccattttatcttcgtgctctgcaacttcttcaattccagagtttctgagaacagacccaaattcaatggcatgaccaagaacacctggctaccattttgttttctcctgcccttgttggtgcatggttctaagcgtgcccctccagcgcctatcatacgcctgacacagagaacctctcaataaatgatttgtcgcctgtctgactgatt

SEQ ID NO: 670 - DNA, 493 bp, homo sapiens
  misc_feature (35)..(35): n is a, c, g, or t
taacctccctgtagtctttaaaatgtttaacttgnctataagctaacatgtaataaaacacatactcaattatatgaatagaagtggagagccagaatgctacaaaagaaatcacagctgctagaagtatcctccatagaaacatcaacatgattgtggatcaaaatgattttcactggatatggaatttgtatgggccatatttattaaaagagttctgtgtggtcacatagagttcctttgggatttcatcccacttttcaggacttaatttgtttgggtttgcttacctaacaagcaacaacaacaacaaaataaatagttccaaaatctagtttattacataaatctctatgaatccttgagggcctatatctatattataaataaatacaaatatagatttttaaatatctatgggactttgccatttacagccttaagtataaaattacgagattatattctttccattaccctttatttctgctaa

SEQ ID NO: 671 - DNA, 460 bp, homo sapiens
aggcaattcagatatccccaaggctgcctctcccaccacaagcccagagtggatgggctgggggaggggtgctgttttaatttctaaaggtaggaccaacacccaggggatcagtgaaggaagagaaggccagcagatcagtgagagtgcaaccccaccctccacaggaaattgcctcatgggcagggccacagcagagagacacagcatgggcagtgccttccctgcctgtgggggtcatgctgccacttttaatgggtcctccacccaacggggtcagggaggtggtgctgccccagtgggccatgattatcttaaaggcattattctccagccttaagatcttaggacgtttcctttgctatgatttgtacttgcttgagtcccatgactgtttctcttcctctctttcttccttttggaatagtaatatccatcctatgtttgtcccactattgta

SEQ ID NO: 672 - DNA, 287 bp, homo sapiens
gccttcgccagcgctgaagctgaagaagatggggacctgcagtgcctgtgtgtgaagaccacctcccaggtccgtcccaggcacatcaccagcctggaggtgatcaaggccggaccccactgccccactgcccaactgatagccacgctgaagaatggaaggaaaatttgcttggacctgcaagccccgctgtacaagaaaataattaagaaacttttggagagttagctactagctgcctacgtgtgtgcatttgctatatagcatacttcttttttccagtttca

SEQ ID NO: 673 - DNA, 509 bp, homo sapiens
ctcaccatctcggagcggtggcagcaggaggtggcagagactgtcttcgacaccatcaacgctgagacagaccggctggaggctcgcaagaaagccaagaacaagcagctgggccatgaggaagactacgccctgggcaaggactgcatcatgcatggctacatgtccaagatgggcaaccccttcctgacccagtggcagcggcggtacttctacctgttccccaaccgcctcgagtggcggggcgagggcgaggccccgcagagcctgctgaccatggaggagatccagtcggtggaggagacgcagatcaaggagcgcaagtgcctgctcctcaagatccgcggtgggaaacagttcattttgcagtgcgatagcgaccctgagctggtgcagtggaagaaggagctgcgcgacgcctaccgcgaggcccagcagctggtgcagcgggtgcccaagatgaagaacaagccgcgctcgcccgtggtggagctgagcaaggtgccgct

SEQ ID NO: 674 - DNA, 476 bp, homo sapiens
ggcacgggtatgtcctcaataacctcaaggaaaataaacttcaaaaattaagatccttggccaggcacggtggcttatgtgtgtaatcccagcacttggggaggctgagggaggtggatcacttgagtccaggagtttgagaccagtctgggcaacatggcgaaacttcatcactaccaaagaagaaaaaaaattagccaggtgtggtggtgtatgcctgtagtcccagatactctggtggctgaggtgagaggatagcttgagcccaggaaattgaggctgcagtgaactatgattgcactactgtgctccagcttgggcaacagagtgagatcttgtctccaaaagtccttgaaggattttaggaagttgttaaaagtcttgaaacgatgtttgggggcatgttagggttcttgaatgtttaattcctctaataactgcttattcaagagaagcatttctgactgggtgcaggg

SEQ ID NO: 675 - DNA, 576 bp, homo sapiens
  misc_feature (192)..(192): n is a, c, g, or t
  misc_feature (194)..(194): n is a, c, g, or t
  misc_feature (207)..(207): n is a, c, g, or t
  misc_feature (254)..(254): n is a, c, g, or t
  misc_feature (260)..(260): n is a, c, g, or t
  misc_feature (285)..(285): n is a, c, g, or t
gtgtcgcaacatcgtgtggatcgctgaatgtatcgcccagcgccaccgcgccaaaatcgacaactacatccctatcttctagcgtcctggcccaaggctctcaattgcactctttgtgtgtgtgtgtgtgtgtgtgcgcgtgtgtgtgcgtgtgtgtgtatgtggtctgtgacaagcctgtggctcacctgncntgtccggggtgtnagtacgctgtcctagcggctgcccagttctcctgaccctcttagagnctgttnttaggcctgaaaaggggctgggcancccccccccaccaaggatggacgaagaccccctccagagcaaggaggccccctcagccctgtggttacagccgctgatgtatctaagaagcatgtcactttcatgttcctccctaactccctgacctgagaaccctggggcctgggggcagtttgagcctcctctcccttctgtgggtcgctcccagagccatggcccatgggaaggacagagtgtgtgtgtccttggggcctggggggatgttgctcctcagctccctccctcagccctgcccctctgagacaataaaac

SEQ ID NO: 676 - DNA, 489 bp, homo sapiens
ggcagcattcaagtccgatggttcctgaatggacaggaggaaacagctggggtcgtgtccaccaacctgatccgtaatggagactggaccatccagatcctggtgatgctggaaatgaccccccagcagggagacgtctacatctgccaagtggagcacaccagcctggatagttccgtcaccgtggagtggaaggcacagtctgattctgcccagagtaagacattgacgggagctgggggcttcgtgctggggctcatcatctgtggagtgggactcttcatgcacaggaggagcaagaaagttcaacgaggatctgcataaacagggttcctgacctcaccgaaaagactaatgtgccttagaacaagcatttgctgtgttttgttaacacctggttccaggacagaccctcagcttcccaagaggatactgctgccaagaagttgctctgaagtcagtttctatcgttctgctctttgattcaaa

SEQ ID NO: 677 - DNA, 514 bp, homo sapiens
gaagtaagcctcatcatcagagcctttcctcaaaactggagtcccaaatgtcatcaggttttgttttttttcagccactaagaacccctctgcttttaactctagaatttgggcttggaccagatctaacatcttgaatactctgccctctagagccttcagccttaatggaaggttggatccaaggaggtgtaatggaatcggaatcaagccactcggcaggcatggagctataactaagcatccttagggttctgcctctccaggcattagccctcacattagatctagttactgtggtatggctaatacctgtcaacatttggaggcaatcctaccttgcttttgcttctagagcttagcatatctgattgttgtcaggccatattatcaatgtttacttttttggtactataaaagctttctgccacccctaaactccaggggggacaatatgtgccaatcaatagcacccctactcacatacacacacacctagccagctgtcaagggc

SEQ ID NO: 678 - DNA, 300 bp, homo sapiens
aaagacaacatggcccaggagggcgtgattctggacgacgtggacagcagcgtgtgccgggaccttgacgtggtccgcaggatcatctgcagtgcaggcctcagcctcctggccgaggagaggcaggagaacctccccgatgagatctaccatgtctatagctttgccctgagatgagccggggctggcaggagaaactgaggaaccacagtcctggtggggggagctggcagctgggcaagatccaggcgccacgctggcggttcgtgagtgtcgaggcaccactaaatatagctgtct

SEQ ID NO: 679 - DNA, 377 bp, homo sapiens
aggatagggcaatcattcccaaggaaagatagaaagtgatgtcccaagagatgttaatgtcaggttgctaagaagcaggtgaaattatctggatataagctccatgaaggcaaacattttgttggaagctccattcccaaagcttaacacttaattggcagccatttgtatgaataagtgaggttaaacaggacagttccatgcagggaacgatggctgctaacacctatccaggacctagtttccatgaccatgcatatctttttaaaaatttcctttgcccacttcttaaatgttaacatacattttctccaagttaagtttcagcccttttctcattgtccatgtgatctttatgtagtcttatccactgccac

SEQ ID NO: 680 - DNA, 507 bp, homo sapiens
agccttgctcaggtgcaagtgccccagggggcggggtgcagaagaatccgagtgtttgccaggcttaaggagaggagaaactgagaaatgaatgctgagacccccggagcaggggtctgagccacagccgtgctcgcccacaaactgatttctcacggcgtgtcaccccaccagggcgcaagcctcactattacttgaactttccaaaacctaaagaggaaaagtgcaatgcgtgttgtacatacagaggtaactatcaatatttaagtttgttgctgtcaagattttttttgtaacttcaaatatagagatatttttgtacgttatatattgtattaagggcattttaaaagcaattatattgtcctcccctattttaagacgtgaatgtctcagcgaggtgtaaagttgttcgccgcgtggaatgtgagtgtgtttgtgtgcatgaaagagaaagactgattacctcctgtgtggaagaaggaaacaccgagtctctgtataatc

SEQ ID NO: 681 - DNA, 101 bp, homo sapiens
ccctcctaggcagctggtggataacagaggagggtcctaagagcaccacaggaagaacccttggctgggccaggacttggacgttgaggtctcggtgtccc

SEQ ID NO: 682 - DNA, 571 bp, homo sapiens
agagagacacagctgcagaggccacctggattgcgcctaatgtgtttgagcatcacttaggagaagtcttctatttatttatttatttatttatttatttgtttgttttagaagattctatgttaatattttatgtgtaaaataaggttatgattgaatctacttgcacactctcccattatatttattgtttattttaggtcaaacccaagttagttcaatcctgattcatatttaatttgaagatagaaggtttgcagatattctctagtcatttgttaatatttcttcgtgatgacatatcacatgtcagccactgtgatagaggctgaggaatccaagaaaatggccagtaagatcaatgtgacggcagggaaatgtatgtgtgtctattttgtaactgtaaagatgaatgtcagttgttatttattgaaatgatttcacagtgtgtggtcaacatttctcatgttgaagctttaagaactaaaatgttctaaatatcccttggacattttatgtctttcttgtaagatactgccttgtttaatgttaattatgcagtgtttccctc

SEQ ID NO: 683 - DNA, 383 bp, homo sapiens
gacactggcaatagcggctctgtagagcacccttttgaaaccaagaagctcaatggaaaggccctgagcagtcgggctgaggagccgccttctcctcctgtccccaaggcatctggctccactctcaacagcgggtctggcaactgtcccaggacccagtctgatgacagtgaggagaggagcctcgaaaccatctgtgccaaccacaacaatggacgcttacaccctcgtccccctcaccctcacaataacgggcagaacttgggggagctggaggtggtggcctactcttccccaggacactcagacactgaccgtgataactcgtccctgacagggacactcctacacaaagattgttgcgggtctgaaatggcctgtga

SEQ ID NO: 684 - DNA, 420 bp, homo sapiens
  misc_feature (83)..(83): n is a, c, g, or t
cactttgcaactccctgggtaagagggacgacacctctggtttttcaataccaattacatggaacttttctgtaatgggtacnaatgaagaagtttctaaaaacacacacaaagcacattgggccaactatttagtaagcccggatagacttattgccaaaaacaaaaaatagctttcaaaagaaatttaagttctatgagaaattccttagtcatggtgttgcgtaaatcatattttagctgcacggcattaccccacacagggtggcagaacttgaagggttactgacgtgtaaatgctggtatttgatttcctgtgtgtgttgccctggcattaagggcattttacccttgcagttttactaaaacactgaaaaatattccaagcttcatattaaccctacctgtcaacgtaacgat

SEQ ID NO: 685 - DNA, 414 bp, homo sapiens
atcccatgggcaataaagcgcattcaatgtgtttataagccaaacagtcactttgtttaagcaaacacaagtacaaagtaaaatagaaccacaaaataatgaactgcatgttcataacatacaaaaatcgccgcctactcagtaggtaactacaacattccaactcctgaatatatttataaatttacattttcagttaaaaaaatagacttttgagagttcagattttgttttagattttgttttcttacattctggagaaccgaagctcagctcagccctcttccttattttgctcccaaagcctcccccaaatcatcactccctgccccccttaaggctagaggtgagcatgtccctcacaattgcacatgtcaagccatcagcaaggcgcatcacacaaaaggcaccaag

SEQ ID NO: 686 - DNA, 458 bp, homo sapiens
  misc_feature (199)..(199): n is a, c, g, or t
  misc_feature (290)..(290): n is a, c, g, or t
gtgtggtttctgagggaacctaccaaatagcaggtagatggaatcagaggactcttgtgtcctgaaagaacctccttaaaaacaactaaaacgaagaacttctggggctgttcacacattgttcaagtcaccccaagatcgttctggcacgctgagctgaacaccaccatctttgttcattctctctctaatgggcaangcaggatcatcgagttgaaaagttgtaaataatgaggatatttatcccgctatttattttttcaataactgtgacctcctgcactgtgaantgctctgtgacatgagattcttagtttaataaaactgtcattaaatttgaatgaattgatattattggttactgaacactggcatgagtttatttttattgtgaagaaaaaaatctacagcaatctaaactaaacctttctaagaaatctagcagtcagtattgtaat

SEQ ID NO: 687 - DNA, 494 bp, homo sapiens
caaggactagagttcctgacctccaggccagtccctgatccctgacctaatgttatcgcggaatgatgatatatgtatctacgggggcctggggctgggcgggctcctgcttctggcagtggtccttctgtccgcctgcctgtgttggctgcatcgaagaggaggcccagggctcctcagagcaggaactccactatgcatctctgcagaggctgccagtgcccagcagtgagggacctgacctcaggggcagagacaagagaggcaccaaggaggatccaagagctgactatgcctgcattgctgagaacaaacccacctgagcaccccagacaccttcctcaacccaggcgggtggacagggtccccctgtggtccagccagtaaaaaccatggtccccccacttctgtgtctcagtcctctcagtccatctcgagcctccgttcaaattgatcatcatcaaaacttatgtggctttttgacctttgaatag

SEQ ID NO: 688 - DNA, 554 bp, homo sapiens
tcatccatctcagcatcaacacaatttccaggggacctcaggtctacctcaggactgaaccgccacacctcaggattcctcctccttgaatctgagactggctgcccattctgagatggggatgaaggtaagatgccgcatcaccagcacgccgcccctgacagctgccttgataccagctctctgtggaaacccccgaggagttggatctggagaacagctgggcctcctcactcaggacttctctcctgaagaacacgcagtgctaaaactgaggatgatttccctaatgcttctgcttggagtctcttatggaggagctgctccttccttacagcttggggatggacttcccacacctccacctcccctgagccctgagccctgtgagaggacgactgtctatgcaatgaggctcggtggggggctctcaagtgcctgatcctgcctggctcagaggcagccagagggaagcaactgacagccccacaggccctccctggcactgtccccatctcagagctcaggagggtacaagctccagaacagtaacc

SEQ ID NO: 689 - DNA, 556 bp, homo sapiens
catgtgagcaaccccgagacaaaaatgctaagtgggatcaagagagcagcactcggagagggtgtttgccagtctgagtgtcccgcggtgcccgccaacccgcttcctgactgacctgagcaaggtcttactaagcagtcccatctctgtgggaggcatgcaacgcgtgcagggagttcaggtgccggtcggcgtagccaggcctggaggccccccaggcaggaggccgcccaaaggcggggccggcgtctcgcagactaggggctgggggcggccacagacggcctcgaaaccacagcccttaccccaatcccacgagccccgccaacgaaccacaggtgctgggctttagagaacatgggaaggcggccccagacctggcgggaacgcctttccctcagagccaggccccggccccgtctgggaagctcatcttgcgaagctgagggagctcagggcaaaggccaggctagcgcggaccggaaggggccgaggctgcacgggcctctgccagaacgctcaggacatcccggcctgggtttacaacgctgttagg

SEQ ID NO: 690 - DNA, 343 bp, homo sapiens
tgcacatcaccacaggtgcacatcaccatgcccagataatttttttgtatttgttgtagagatgaggtttcactatgttgcccatgctagtctcaaactcctgggctcaagtgatccacccaccacagcctctcaaagtgctgggattacaggtgtgagccaccgcacccagcctcccttctgcatttattgctggaattctgaaaaatttgtttttgctcatcagttattttatatgtggaggtacaatttgtataggaaagttagaataaaatactttgtttctttctccttattttcttgttttcagaataaatgagttgcttcactatcaccctccaaa

SEQ ID NO: 691 - DNA, 379 bp, homo sapiens
  misc_feature (188)..(188): n is a, c, g, or t
gacaagtccaccgagggggaggtgagcgccgacgaggagggctttgagaacctgtgggccaccgcctccaccttcatcgtcctcttcctcctgagcctcttctacagtaccaccgtcaccttgttcaaggtgaaatgatcccaacagaagaacatcggagaccagagagaggaactcaaaggggcgcngcctccgggtctggggtcctggcctgcgtggcctgttggcacgtgtttctcttccccgcccggcctccagttgtgtgctctcacacaggcttccttctcgaccggcaggggctggctggcttgcaggccacgaggtgggctctaccccacactgctttgctgtgtatacgcttgttgccctgaaataaata

SEQ ID NO: 692 - DNA, 481 bp, homo sapiens
aggacatacagtttctcccaggatcacagaagcttgtcacctgcacagggtaccaccaggtccgtgtttatgatccagcatccccccagcgccggccagtcctagagaccacctatggagagtacccactaacagccatgaccctcactccgggaggcaactcagtgattgtgggaaacactcatgggcagctggcagaaattgaccttcggcaagggcgtctactgggctgtctgaaggggctggcaggcagtgtgcgtgggttgcagtgccacccttcaaagcctctactagcctcctgtggcttggacagagtcttgaggatacacaggatccagaatccacggggtctggagcataaggatgagccccaagagcctcaagaacccaacaaggtgcccctagaagacacagagacagatgaactttgggcatccttggaggcagctgccaagcggaagctctcgggtttggagcagcc

SEQ ID NO: 693 - DNA, 309 bp, homo sapiens
gaaggacggcaggaagcgcaagcgcagccgcaaggagagctactccgtatacgtgtacaaggtgctgaagcaggtccaccccgacaccggcatctcctctaaggccatgggaatcatgaactccttcgtcaacgacatcttcgaacgcatcgcaggtgaggcttcccgcctgccgcattacaacaagcgctcgaccatcacctccagggagatccagacggccgtgcgcctgctgctgcccggggagttggccaagcacgccgtgtccgagggcaccaaggccgtcaccaagtacaccagcgctaagta

SEQ ID NO: 694 - DNA, 128 bp, homo sapiens
cagcaacagcaaatcacgaccactgatagatgtctattcttgttggagacatgggatgattattttctgttctatttgtgcttagtccaattccttgcacatagtaggtacccaattcaattactatt

SEQ ID NO: 695 - DNA, 416 bp, homo sapiens
aacacatctgtagtcttggccaaatgatacactttattttgtggaagtagagaatcaagagaattggttctaggaacctgggttcgttcatcattgttgtttatttttttaaaataaataaataaatatatatatagatgctctgcaacaaactctgtgacagtatccttcagtagagaaagtttcttacttgtgagtacactcttttagaacatttacgggtggcagcagctttgctttagagtttagaagataatagaaggaatgactattcatgtccaaagtgaatggttttgtgcagtgaacaacacatggcgaggtactaactgagaaactttttcatgctttatgcctacctcttgtagttgttgcagagcaaatataaattgtaataagatagctaggccttgcagaaa

SEQ ID NO: 696 - DNA, 108 bp, homo sapiens
cctctccaaggagtaccggttacagtacttggcctctgaaacagtgctgaacttggcttttgcgcagctcattcttggaatcccagaacaggccttaagtcttctcca

SEQ ID NO: 697 - DNA, 536 bp, homo sapiens
  misc_feature (30)..(31): n is a, c, g, or t
ggttctggtgtggttgttggagccggaggnngcgtgtcagcacgtgctgagggcatggggcctgccccctgggcacccatccacaagctgggccacggagctccagcttctcaggacaaagccccggggctggcgcatcctgagggtctctgggggtgtttgccaggctcctgggatgggccgctttcagaagccctgcagtgcctccagatggaaaggcgggcccggcctccggttgggtctgcattttggagagtccacaccacggaccaggttttcccccaaggcttggctttgtgtagctactaacttcttggggcattctgagagtgtgggcagagagaattatgtggcctcatcctcccccaaggctgtgcttgcagcccgggcaccttcccactttctagctctggagaggttggattttgcttttgtaaacacatgaatccttatgataaaagtctgtcagtcaaaaatacatttataaattatttaatgccagtcctcatgtaacctcaggtatcttcagcttgtgg

SEQ ID NO: 698 - DNA, 546 bp, homo sapiens
  misc_feature (115)..(115): n is a, c, g, or t
  misc_feature (193)..(193): n is a, c, g, or t
  misc_feature (219)..(219): n is a, c, g, or t
  misc_feature (287)..(287): n is a, c, g, or t
  misc_feature (307)..(307): n is a, c, g, or t
  misc_feature (356)..(356): n is a, c, g, or t
  misc_feature (391)..(391): n is a, c, g, or t
tcggtcagggagaccctaacctagcggtgctagaggaattaaagacatagacacagaaatatagaggtgtgaagtgggaaatcaggggtctcacagccttcagagctcagccacnaacagagatttacccacgtatttattaacagcaagccagtcattagcattgtttctatagatattaaattaactaaangtatcccttatgggaaacgaagggangggccgaattaaaggaataggttgggctagttaactgcagcaggagcatgtccttaaggcacagatcnctcatgctattgtttgtggnttaagaatgcctttaagcggttttccaccccgggcaggccaggtgttcnttgccctcattccagtaaacccacaaccttccagnatgggtgttagggccattatgaacatgttacagtgctgcagagattttatttatggccagtttatggccagattttggggggcctgctcccaacactctacatatgctccatcttgcagaggcttcattcttggttctctagctaaaaacagtag

SEQ ID NO: 699 - DNA, 540 bp, homo sapiens
  misc_feature (82)..(83): n is a, c, g, or t
  misc_feature (117)..(117): n is a, c, g, or t
  misc_feature (120)..(121): n is a, c, g, or t
gcacgcgtgctcatcttgtgtaaaagtaaaagttgctcatgtcattagctcggctctgagtttgcatgagaaaccagcgcanntctcgagccacgggagaaaacacgatctgctgcngannccagtgacctgaaactgtagcagtgactcgagacctgtcctctcctcgacgtcgccctataaccctcccgctttatttaggatccgcttttccgagagcagccactcaggcaacccccggaaggtttgttaggagtttctccttgaaacgctttccgattccatcttttgaaatccagcaggcgagagtcacgacagactccaggacctcttgagcgctgtccgcagccccacggtaggagtagccctagtgcacgagacttggcggtggctgaaaagctcgcccaaacgcacgcaccacctctctgcggggttgcggattgcgggttgcggtctttgtccgctcgcccttcctccggggccgcacactcccgcatctggccggcaggtggcgcggttggctcacgatgagctgcggcc

SEQ ID NO: 700 - DNA, 395 bp, homo sapiens
gtcagtcacagggagggatgcacactttccttttgaccaaggagggggcagctgattccccgctgcgtctaaaatcaaagcgccaatctcataagtaccaggctgaattccccatgagtcctgtgacctcggcccacgcggggacctacaggtgctacggctcactcagctccaacccctacctgctgactcaccccagtgaccccctggagctcgtggtctcaggagcagctgagaccctcagcccaccacaaaacaagtccgactccaaggctggtgagtgaggagatgcttgccgtgatgacgctgggcacagagggtcaggtcctgtcaagaggagctgggtgtcctgggtggacatttgaagaattatattcattccaacttgaagaatt

SEQ ID NO: 701 - DNA, 493 bp, homo sapiens
aagtgatggacataaccctctcctaggacatacatgtaaatgcacaatgtgactcattctcatacttttttgttcagctctgagcctcaaaagtgatttgtcagcagcgctggcatgcaggctttgcctggctgctatctctagaggcaagtctgccacgagagggcactgcaggcgaagcagttgtgcttgctcattgcctcagcccaagtgtactcaaagaaaagaggcagccagctgtgcgtgctgtacggaaagcctcccgccctccctgcagctccccgccctcagtggcccagggctttgttgaagtggaactccccacttccaacctggtatggctccttctgcgaagggaagctgatcccagcctcctgagctgaatccttcaaaggcacagcaggcagaatgagggccacaggcaggagtggtgtgggcacactgcttaggagtcaacatcttcatcattgggctttctttaaaacgtgcactt

SEQ ID NO: 702 - DNA, 311 bp, homo sapiens
aaccttagctcttggctatctcttccctgagcacaccctggccctggggcctgagatctctccatgcaggggcagccatgagctccgggggcagcagcaaggctggccacaccacccatcagccacctccagccccgccgctcaaccagccatcagtcccttaactgccagtgttcgtggaccatgcaaaacaaccaagaggaagagaagggaccatctcaggtatgacttcaaatcaagccactgggttgtctgagaagtaccccaagcaactagtctggactgggaggttgaattgagtccttgctgtt

SEQ ID NO: 703 - DNA, 482 bp, homo sapiens
  misc_feature (254)..(254): n is a, c, g, or t
acaattgaggatttccacaacacgttcatggacctgattgagcaggtggagaagcagacctctgtcgccgacctgctggcctccttcaatgaccagagcacctccgactaccttgtggtctacctgcggctgctcacctcgggctacctgcagcgcgagagcaagttcttcgagcacttcatcgagggtggacggactgtcaaggagttctgccagcaggaggtggagcccatgtgcaaggagagcgaccacantccacatcattgcgctggcccaggccctcagcgtgtccatccaggtggagtacatggaccgcggcgagggcggcaccaccaatccgcacatcttccctgagggctccgagcccaaggtctaccttctctaccggcctggacactacgatatcctctacaaatagggctggctccagcccgctgctgccctgctgcccccctctgccaggcgctagacatgtacagagg

SEQ ID NO: 704 - DNA, 415 bp, homo sapiens
gccctgactctccaaatgaacataaagacacaccaaaaggctggtaacagagctagctgggacaatcactgcatctatagaacagccaataccttgaaaaactaggcacaagtacatgaggaattcttatcaaagatcatgcacaatccatgccacttaaatgggttttagctgaggttttgctcatgttactctgaatttctaaggacagatcagtgaccctcttagcctgagcagaaagcatattcttcccactgcagtttcctacacaatttagtcctgattagatgaggcattatagcagcacctgaagtagagcctccagaatccactgcccttttcatcaaaggctatttggttccaccctcaggattggcatactcacgagacatttcacaatcctaatgcatacttt

SEQ ID NO: 705 - DNA, 527 bp, homo sapiens
acagcgaggaaccctgtggtcctcaggcaggtgtaccttgagtcagccaggagccctcttttcctgtgtcaaagcctgccctcgggctctgctcacctctggtgaccctccaagatgcccctgccctcagtttcccctcatgatctggcctctgcccccttctctagccacagcctctagtacactttagcaataccaccagactagttagagttccccactcaccaagcaagacatgcagtttcatgcctctgtgccttcgctcatgctgtttcttccgactggaatgccttcccctgctcctcctgccttgtctgcctggcaagttcatctctcacgatcccctcaaaggccccctcctccaggaaggcaacccctgtgcccctcccctccaggctacctctgcactttgtcaatgcttctcttgtggcacttatcacactgtattttacttgtttacatgtttgtctccccttctagactgtgaatccttaagggcatggactgtatcttatgcatctctgtat

SEQ ID NO: 706 - DNA, 355 bp, homo sapiens
gttgggatcgcattgcataccttcggggtacaagtcagtttctacactgggtgctgatccttgcacgcgccctttctaccatctcacggtggggatggccgcagggctgtgcacccagaagaagatggctgttagcgtttcggccttcataatggcctgagactttctttctgtaggtggtctggagctgtccggctggtggccccctattttgccatttagcgaacaaccacaggaattttaaaaacaaaaacatcccaagattttttcatttcaaaatgcttcaaagtccacattagatcagatactccgctgtcggcacattcagctgaggttcattacaatcgagactgca

SEQ ID NO: 707 - DNA, 354 bp, homo sapiens
  misc_feature (206)..(206): n is a, c, g, or t
  misc_feature (210)..(210): n is a, c, g, or t
  misc_feature (267)..(267): n is a, c, g, or t
tgaggcgcccggatttcttctgcaggcagaagggagccaagacaggatgtctagcaggggagggcctggagcaggcaggggtgggcgtggggaccggaggcaggacagctgtgaagaggccgcagggatgggaaggggggacggggctggacccaaggcagaggcagtgagcacgggtgacagatgtcgtcaccccggcaggcctncacncctggggcggcccctgctcagcttctgcccattgttgccgcagcacgtaacacctgncacagccagagcttccgacgtctcaagagaagtgggaagtgagatttatgcatgaaagaaaccgcttggtttttagagattggtgac

SEQ ID NO: 708 - DNA, 402 bp, homo sapiens
tagagcagaatgcagaccacgccgctggatgccgagagaccctgctctccgagggaggcatctgtgtcatgctgtgagggctgaggacggggccctagtctctggttttctggtcttaacatccttatctgtgtccgccacggaggtgactgagctgctagcgagttgtcctgtcccaggtacttgagttttggaaaagctgactcacgcccatccatctcacagcccttccctggggacagtcgcttccgccttgacacctcactctcagttgaataactcaagcttggtcatcttcagactcgaattcttgagtagacccagacggcttagcccaagtctagttgcagctgcctcggcaagtccccatttgctcaggcagccctgaatgggcctgtttac

SEQ ID NO: 709 - DNA, 409 bp, homo sapiens
gtagatcccttcagttcaaaacataatgtgattgtgggcagaaatggatctggaaaaagtaactttttttatgcaattcagtttgttctcagtgatgagtttagtcatcttcgtccagaacagcggttggctttattgcatgaaggtactggtcctcgtgttatttctgcttttgtggagattatttttgataattcagacaaccggttaccaatcgataaagaggaagtttcacttcgaagagttattggtgccaaaaaggatcagtatttcttagacaagaagatggtcacgaaaaatgatgtgatgaacctccttgaaagcgctggtttttctcgaagcaatccttattatattgttaaacaaggaaagatcaaccagatggcaacagcaccagattctcagagat

SEQ ID NO: 710 - DNA, 413 bp, homo sapiens
  misc_feature (90)..(98): n is a, c, g, or t
  misc_feature (100)..(101): n is a, c, g, or t
  misc_feature (103)..(104): n is a, c, g, or t
  misc_feature (123)..(123): n is a, c, g, or t
  misc_feature (157)..(158): n is a, c, g, or t
tccttttccttcttgtaactgagaagaacttgccttgagccacgtcaagtcccgtccgtcgcagccactgcccacaagcgtgagtctgcnnnnnnnnngnngnnccatggcagggcatcccancgccattcctgccttcacacacacttgctgccgnntccctgtgctgggggctgtgcaggtctgcctcggtgtggacttttctcttaggaaagagccccaggtcggccgagcacggtggctcatgcctgtaatcccagcactttgggaggctgaggcgggcagatcacgaggccaagagatcaagacaatcctggccaacatggtgaaatcccgtctctactttttaagtattttatacttaaaatttttgtattttatacaaaaattagcgggcttggtggcagatgcct

SEQ ID NO: 711 - DNA, 286 bp, homo sapiens
agcagctgaacgagcagtttaactgggtgtcccggctggcaaacctcacgcaaggcgaagaccagtactatctgcgggtcaccacggtggcttcccacacttctgactcggacgttccttccggtgtcactgaggtggtcgtgaagctctttgactctgatcccatcactgtgacggtccctgtagaagtctccaggaagaaccctaaatttatggagaccgtggcggagaaagcgctgcaggaataccgcaaaaagcaccgggaggagtgagatgtggatgttgc

SEQ ID NO: 712 - DNA, 564 bp, homo sapiens
caggggcagtcgttgagcctttgagaacttctgttccaaggctcccatcagagagtaagaaggaagactcctctgacgctacccaagtcccccaagcaagtctcaaagccagtgatctctctgactttcaatcagtttccaagctaaaccaggggcaagccatgcacatgcataggcaaggaatgccagtgtaagagatggcatgatatggaagtgtattccttttcaggcctgcagagtgtccctcccttggctccagaacgaagatccacacttgaggactactctcagtcgctgcacgccagaactctgtctggctctccccgatcctgttctgagcaagctcgagtcttcgtggatgatgtgaccattgaggacctgtcaggctacatggagtattacttgtatattcccaagaaaatgtcccacatgggcagaaatgatgtacacctgatagcaagaagctaattcatatgctttaaaccaatgaaggcttgtcaaagagatttagttaatggcagaccttgtggccactttgtgtgagaagacatctctttctgctca

SEQ ID NO: 713 - DNA, 507 bp, homo sapiens
accagagtggaacccgctgcaaaatccccagccttaattcttgcttcaggacccagaccggtgtcttgctctagggcaacccagggcagaggggccaggtctgcccagcgtttaccactgctgtcaagccacagcccttggccaccatacgggccatcctcagtgaggcagccccccataggcttccgccaagctctggtcccgaagaggctgtgcgagcccttcccggccctccccagggccccccgccccctcctctgcctgctgcgtggaggcagccatgggaaggagcccaggggagctggcctgggggagcgaagcccatgttcgcttcctgacttagagctggggggggtggggggtggggcttgttcccctgcagtatctgttctgtgaagtttgttaaatgtaaggaaagcttaaattcttgtatctttaaaagagaaaatcttatttaacccttttgtgttctagatttacttacacacatagcctagagctcagttt

SEQ ID NO: 714 - DNA, 515 bp, homo sapiens
gctgcaacgtatgcgagtgccattcaggctaccagctgcctctgtgccaggagtgccccggctgcccctcaccctgtggcaagtacatctcctgcgccgagtgcctgaagttcgaaaagggcccctttgggaagaactgcagcgcggcgtgtccgggcctgcagctgtcgaacaaccccgtgaagggcaggacctgcaaggagagggactcagagggctgctgggtggcctacacgctggagcagcaggacgggatggaccgctacctcatctatgtggatgagagccgagagtgtgtggcaggccccaacatcgccgccatcgtcgggggcaccgtggcaggcatcgtgctgatcggcattctcctgctggtcatctggaaggctctgatccacctgagcgacctccgggagtacaggcgctttgagaaggagaagctcaagtcccagtggaacaatgataatccccttttcaagagcgccaccacgacggtcatgaaccccaagtttgctgag

SEQ ID NO: 715 - DNA, 582 bp, homo sapiens
  misc_feature (86)..(86): n is a, c, g, or t
gcctgttgactcttgttattatcatgatattcacaaaacgccgcatgtttaaaaagtcatagatgtcatcttctctctgcccccangggaggaaagccaccttctcttgccccttggcccctttgtcaggggccaggggtctgccgggtgggggtgccaacaggcctggccctttcctcccctgcatccagccatgggggcctctgcgattgccggaaggttgcatggctggtcccagggccagcacaggcccgaggccgggctgcctggttttatttttatttaactttattttctgttttatgagtgtgtgtccgcccacccccacccccttcagtgttaagtggggagccctgggggagtctctcctgcctcccagcctctcccaagacctcccccctcgtcaccagccatccctctggaccaggcagagggcggaccgggtgggcaggggcctgagggtggctcgggccagcccaccagccaatggacccctcctcaggccgccagtgtcgccctgcccctttttaaaacaaaatgccctcgtttgtaaacccttagacgcttgagaataaacccctt

SEQ ID NO: 716 - DNA, 595 bp, homo sapiens
  misc_feature (249)..(249): n is a, c, g, or t
  misc_feature (288)..(288): n is a, c, g, or t
  misc_feature (427)..(428): n is a, c, g, or t
  misc_feature (522)..(522): n is a, c, g, or t
  misc_feature (524)..(524): n is a, c, g, or t
ccagatgtatttgggttggtcgtcctcccattggaactgaaactacggatcttccgacttctggatgttcgttccgtcttgtctttgtctgcggtttgtcgtgacctctttactgcttcaaatgacccactcctgtggaggtttttatatctgcgtgattttcgagacaatactgtcagagttcaagacacagattggaaagaactgtacaggaagaggcacatacaaagaaaagaatccccgaaaggngcggtttgtgatgctcctgccatcgtcaactcacaccanttccattctatcccaaccccttgcaccctaggccatttcctagctcccgccttcctccaggaattatcgggggtgaatatgaccaaagaccaacacttccctatgttggagacccaatcagttcactcattcctggtcnnggggagacgcccagccagtttcctccactgagaccacgctttgatccagttggcccacttccaggacctaaccccatcttgccagggcgaggcngncccccaatgacagatttccctttagacccagcaggggtcggccaactgatggccggctgtcattcatgtga

SEQ ID NO: 717 - DNA, 365 bp, homo sapiens
gacccgtccatttggcaggggtggctgcctcatttagagaggaaaagtaaccatcactggttgcacttatgatttcatgtgcggggatcatctgccgtgcctggatcctgaaatagaggctaaattactcaggaagaacaccctctaaatgggaaagtattctgtactcttagatggattctccactcagttgcaacttggacttgtcctcagcagctggtaatcttgctctgcttgacaacatctgagtgcagccgtttgagaagaaaacatctattctctccaaaaatgcacccaactagctctatgtttacaaatggacataggactcaaagtttcagagaccattgcaatgaatccccaat

SEQ ID NO: 718 - DNA, 509 bp, homo sapiens
ggttcagaaggggcccgttcaggtggagccgccacctcccatggagcatgctcagatggagggtgcccagatacggcctgctcctgacgagcctgttcagatggaggtggttcaggaggggcctgctcagaaggagctgctgcctcccgtggagcctgctcagatggtgggtgcccaaattgtacttgctcacatggagctgcctcctcccatggagactgctcagacggaggttgcccaaatggggcctgctcccatggaacctgctcagatggaggttgcccaggtagaatctgctcccatgcaggtggtccagaaggagcctgttcagatggagctgtctcctcccatggaggtggtccagaaggagcctgttcagatagagctgtctcctcccatggaggtggtccagaaggaacctgttaagatagagctgtctcctcccatagaggtggtccagaaggagcctgttcagatggagttgtctcctcccatgggggtggttcaga

SEQ ID NO: 719 - DNA, 581 bp, homo sapiens
  misc_feature (408)..(410): n is a, c, g, or t
cgccatcgtagtagaagcagggagcggaagaagtctcgatccaggagtagggagcggaagaaatcgagatccagaagcagagagaggaagaaatcgagatccagaagcagggaaagaaaacggcggatcaggtctcgttcccgctcaagatcaagacacaggcataggactagaagcaggagtaggacaaggagtaggagtcgagatagaaagaagagaattgaaaagccgagaagatttagcagaagtttaagccggactccaagtccacctcccttcagaggcagaaacacagcaatggatgcacaggaagctttagctagaaggttggaaagggcaaagaaattacaagaacagcgagaaaaggaaatggttgaaaaacaaaaacaacaagaaatagctgcagcnnntgcagctactggaggttctgttctcaatgttgctgccctgttggcatcaggaacacaagtaacacctcagatagccatggcagctcagatggcagccctgcaagctaaagctttggcagagacaggaatagctgttcctagctactataacccagccgctgttaatccaat

SEQ ID NO: 720 - DNA, 551 bp, homo sapiens
gaagaaggcggcgttgtccatgtgcaagtctgtggtggcccctgccacggatggtggcctcaacctgacctccaccttcctcaggaaaaaccagtgtgagacccgaaccatgctgctgcagcccgcggggtccctcggctcctacagctaccggagtccccactggggcagcacctactccgtgtcagtggtggagaccgactacgaccagtacgcgctgctgtacagccagggcagcaagggccctggcgaggacttccgcatggccaccctctacagccgaacccagacccccagggctgagttaaaggagaaattcaccgccttctgcaaggcccagggcttcacagaggataccattgtcttcctgccccaaaccgataagtgcatgacggaacaataggactccccagggctgaagctgggatcccggccagccaggtgacccccacgctctggatgtctctgctctgttccttccccgagcccctgccccggctccccgccaaagcacccctgcccactcgggcttcatcctgcacaataaactc

SEQ ID NO: 721 - DNA, 497 bp, homo sapiens
cccctcctctagctgtgggggtgagggtcccatgtggtggcacaggcccccttgagtggggttatctctgtgttaggggtatatgatgggggagtagatctttctaggagggagacactggcccctcaaatcgtccagcgaccttcctcatccaccccatccctccccagttcattgcactttgattagcagcggaacaaggagtcagacattttaagatggtggcagtagaggctatggacagggcatgccacgtgggctcatatggggctgggagtagttgtctttcctggcactaacgttgagcccctggaggcactgaagtgcttagtgtacttggagtattggggtctgaccccaaacaccttccagctcctgtaacatactggcctggactgttttctctcggctccccatgtgtcctggttcccgtttctccacctagactgtaaacctctcgagggcagggaccacaccctgtactgttctgtgtcttt

SEQ ID NO: 722 - DNA, 535 bp, homo sapiens
  misc_feature (45)..(81): n is a, c, g, or t
  misc_feature (148)..(148): n is a, c, g, or t
  misc_feature (152)..(154): n is a, c, g, or t
  misc_feature (156)..(156): n is a, c, g, or t
  misc_feature (202)..(205): n is a, c, g, or t
  misc_feature (492)..(492): n is a, c, g, or t
cgggcaccatgataccctatgttctggggattagcagtgaggaannnnnnnnnnnnnnnnnnnnnnnnnnnnnnnnnnnnngatgaggaacttgaggcaagtcaccagcccctgatcatttcgcctaaaagagcaaggactagagttnctgnnntncaggccagtccctgatccctgacctaatgttatcgcggaatgatgnnnngcccagggctcctcagagcaggaactccactatgcatctctgcagaggctgccagtgcccagcagtgagggacctgacctcaggggcagagacaagagaggcaccaaggaggatccaagagctgactatgcctgcattgctgagaacaaacccacctgagcaccccagacaccttcctcaacccaggcgggtggacagggtccccctgtggtccagccagtaaaaaccatggtccccccacttctgtgtctcagtcctctcagtccatctcgagcctccgttcaaantgatcatcatcaaaacttatgtggctttttgacctttgaatag

SEQ ID NO: 723 - DNA, 190 bp, homo sapiens
ctcctgccgctgttcagagaggtggatatggtcgacataacggaggacttcctggttcaagccaagacctacctgggggaggagggcaagagggtgaggaactacttctgttgtgggctccaggacttcaccccggagccggactcttacgacgtgatctggatccagtgggtgataggccacctcaccg

SEQ ID NO: 724 - DNA, 448 bp, homo sapiens
  misc_feature (144)..(144): n is a, c, g, or t
  misc_feature (155)..(155): n is a, c, g, or t
  misc_feature (160)..(160): n is a, c, g, or t
  misc_feature (164)..(164): n is a, c, g, or t
  misc_feature (167)..(167): n is a, c, g, or t
  misc_feature (214)..(214): n is a, c, g, or t
  misc_feature (222)..(222): n is a, c, g, or t
gcaggtgagcgacgaccttacagagcgagccgccacctttgggctcatcctggatgacgtgtccttgacacatctgaccttcgggaaggagttcacagaagcggtggaagccaaacaggtggctcagcaggaagcagagagggnccagatttgtnggtgngaanaanggctgagcaacagaaaaaggcggccatcatctctgctgagggcgacntccaaggncagctgagctgattgccaactcactggccactgcaggggatggcctgatcgagctgcgcaagctggaagctgcagaggacatcgcgtaccagctctcacgctctcggaacatcacctacctgccagcggggcagtccgtgctcctccagctgccccagtgagggcccaccctgcctgcacctccgcgggctgactgggccacagccccgatgattcttaacacagc

SEQ ID NO: 725 - DNA, 518 bp, homo sapiens
  misc_feature (96)..(96): n is a, c, g, or t
  misc_feature (102)..(102): n is a, c, g, or t
  misc_feature (122)..(122): n is a, c, g, or t
  misc_feature (126)..(126): n is a, c, g, or t
  misc_feature (133)..(133): n is a, c, g, or t
  misc_feature (243)..(243): n is a, c, g, or t
tcagccccagtcgagaggaaagagaatcgggccactgccagaaagagagtcaagcaaacctggaagggcaaatctgagagtgggaaggccaaaggncgaggncccagatttagtattcactnagcnagcgccnttcgggtagcaggatgattccttttcctgcctgtctgctgctggctctcttccctaaggtacaggttggcaggaccacctccgcctacttctccaccatccctagcatgncagcccgttcccagatcaacctgccagtggagtcaggcagtgcactcctggagccaagagggaagggcagggtagagagggtatgtccagtagcctggagctccatggtggcttcatgcctcccttctcccagctcaggtggccctgagggctccctcggaacagtgcctcaaatcctgacccaagggccagcatggggaagagatggttgcaggcaaaatgcactttatagagattttctattgctgggaaggtgtgtttctcccacaatttgt

SEQ ID NO: 726 - DNA, 517 bp, homo sapiens
ataaaatgtctacgtctttctccagtttctgagccctatgcacattggcttgtgggcttgttcttcctgccaaatgatcagagagggaacattccatttatttgtagtggatttcctctggagggcatgtacccacactaaataccaactgctcttcctcagctgtagtccccaacatcagacttggcacgtggtggacactaacacacaggcactcaatgaatgagtgaaggaaataaaagtcaccccccgttggtgagaaggtgcctatccccctgagtcctcagtgcaggaccagtggatgaaaggcaaggtaaagaggcccaagataggctggcttcccccgttcaaggtatagtctgcctttaagggagttttagaaccaacatgcaagacattgaaagaaatcttgcaagagccattattgacttagatccaaaacagcctctctcatgtctaaaaaggcacagaattttgcagatctgaggaagagggatgcattacctttttgcttctt

SEQ ID NO: 727 - DNA, 165 bp, homo sapiens
  misc_feature (52)..(52): n is a, c, g, or t
aggagttcatgaaggcagaaatgcctggggcccacgaacatcccagtgtggncctggacgggacatcatgctgggcaacacagctaaaatgcgggtgaagaccagatttcttgcacatggcggtgacgggatgctccctagagagcttcaagtggattctttgct

SEQ ID NO: 728 - DNA, 533 bp, homo sapiens
  misc_feature (360)..(361): n is a, c, g, or t
gaggtcagatttggagcttctcattgcacgcggagattattattgcatcgggttccaagccaatgggaagcccgggggaggggtttggcatgaggaagcgttggttacagcagctgattggctgcagccaagactgtgaaaggataaagaggcgcgaggcggaattggggtctgctctaagctgcagcaagagaaactgtgtgtgaggggaagaggcctgtttcgctgtcgggtctctagttcttgcacgctctttaagagtctgcactggaggaactcctgccattaccagctcccttcttgcagaagggagggggaaacatacatttattcatgccagtctgttgcatgcaggctttnnggcttcctaccttgcaacaaaataattgcaccaactccttagtgccgattccgcccacagagagtcctggagccacagtcttttttgctttgcattgtaggagagggactaagtgctagagactatgtcgctttcctgagctaccgagagcgctcgtgaactggaatcaact

SEQ ID NO: 729 - DNA, 483 bp, homo sapiens
gctgagtaacaggccaccaagcggctactgcgttatatcttctcagcaaccggccgcagtctcttctgcaccattttctacaccagacctgcttggcaccacagggagctcttttcctgccctgcacaatgacattccaaccaccaccagccagacattacagccaaccttgctgattgtcacaagcaggaccttggggccactggcactgtcagatagtaagccatttcttgggtagaggaggaaactcctctccacaaatccacttgggcctgtgcaaatggcacttgaaagagtccccatgcacttggagtccatgagccaatgggatatgcaaagacgcttaaacatttcagggctggtttctctgttcatatccaattctggtgcttaggaacagggacccatgctgatgcccaagggcaaaaagccccacttcctttaaggaagtgaacaggcctgaccctgatgcccaataacggg

SEQ ID NO: 730 - DNA, 533 bp, homo sapiens
atctggcaaactgaaccctttttatacatcgacactgtgtgtgatcgctcagaccctgtcttccctaccactgggtacagatggatgcggcgaagtcaagagaaccaatggcagaaggaggagtgtagagcttacatgcagatgctgaggaagttgttcacagcaatccgtgccctgttcctggctgtctgtgtcttgaaggtcattgtgtccttggtttccttgggagtaggtcttcgaaacttgtgtggccagagctcccagcccctgaatgaggaaggatcagagaagaggctactgggggagaattcagtgcccccttcgccctctagggagcagacctccactgccattgtcctgtgagccgccaaagaccccacggggtgcccgcatgtccctgtctagggcagcccagggcccccactcctggctcctcacacttgcctcccctatggccgctctccagaccctcctcctttcttctccccacatccgcacctgctgttcccactctggggttctcaagtccatga

SEQ ID NO: 731 - DNA, 441 bp, homo sapiens
ttttatttttacacccatcagatttaaggaaaagactttttagccattataatctagtggttggaaggaatgaagaagcttttttagtaataggtccagatatgagtgctaaaaataaagatgatagcatgttcttctgtcttccatagttattacaactatgagagcctcccaagtcatcttatcaactcaacccccttttttttgtcttaatgttgcacataagtttatacagagtggatgaccacactagcacagaagagaacaacatgtattaaagcaggtgattcctcccttggcgggagagctctctcagtgtgaacatgccttctgtgggcggaaatcaggaagccaccagctgttaatggagagtgccttgcttttatttcagacagcagagttttccaaagtttctctgctcctctaacagcattgctcttt

SEQ ID NO: 732 - DNA, 559 bp, homo sapiens
ggtgtgcttcgtgctgtagttatcgttagttcctcttcccgagatggggccgccgagagaccccagcgcctttgaaaagcaaggtttgtgctgcgcttccagttccgaaaagcagatgtttaagcccttggactgagggtgggatcgcagctccgaagacggagaggagggaaatggggccctttcccctctattgcatccccctgcccgactccttccccgcacccacgtgccctagattcatggcagaaaatgaccaaatcctgtgtatttgttttatatatttaataactgttttaaatgaaagttttagtaaaaaaaatacaaaacaaaaagattaaattgctattgctgtagtaagagaagctctttgtatctgaacatagttgtatttgaaatttgtggttttttaatttatttaaaattggggggagggcatgggaaggatttaacaccgatatattgttaccgctgaaaatgaactttatgaaccttttccaagttgatctatccagtgacgtggcctggtgggcgtttcttcttgtacttatgtggtttt

SEQ ID NO: 733 - DNA, 386 bp, homo sapiens
tgtgcaagtcgcactgaaatcctgaaaggccaagcctggagcccgtccaggcttttcattaaggacataatatttacgtctaacagaccttttttcttgtgtatacaagtatatatttttgtttgacgcggactaaatcattttcatttaatttccggtaaacaaaacccacgcgaatggacacttgtacccgatcataataaaaatggataataatgtgaaggaagaaaagagccgcttgaatcgccgctcagccccctttgtttctgctttctgcggtgatcagagggcgcgtttgggtttgatggcgagtttctaaaggcgaggaaatggtttgtaagaggggaaagaaaaggagaaaggtctaatcaagctcgggttgttca

SEQ ID NO: 734 - DNA, 525 bp, homo sapiens
gacagctggcatagcaagtccactgactaccatggtttgttgttaccgcatatcgaggggcccgaaatcaaagtctgggcccagcgctacctacgttggattccagaagcccaaatcctaggtggtggccaagtggccactctgagcaaactcttggaaatgatggaggaagtccagagtttacaagagaagatcgacgagagacaccacagccagcaggccccccaggctgaggccccctgcctgctgaggaactctgcccgcctctcgtctttgtttcctttcgctctgctccagcgacattcctctaagcccgtcttacccaccagtggctggaaagctttgggagatgaagacgatttggccaaacgagaagatgagttcgtggacctaggggatgtgtgacctgtttgttgagtgattgtgaaagaggaatgtgggagattgggacagctgatccctggatttgtgtcacgctacagctcatgctggctgggtccttagcccggcactccgttagaataa

SEQ ID NO: 735 - DNA, 266 bp, homo sapiens
gcctacttcggcgtgtacgatacggccaagggcatgctccccgaccccaagaacacgcacatcgtggtgagctggatgatcgcgcagaccgtgacggccgtggccggcgtggtgtcctaccccttcgacacggtgcggcggcgcatgatgatgcagtccgggcgcaaaggagctgacatcatgtacacgggcaccgtcgactgttggaggaagatcttcagagatgaggggggcaaggccttcttcaagggtgcgtggtccaacgt

SEQ ID NO: 736 - DNA, 505 bp, homo sapiens
taccatgaagctctgcgtgactgtcctgtctctcctcatgctagtagctgccttctgctctccagcgctctcagcaccaatgggctcagaccctcccaccgcctgctgcttttcttacaccgcgaggaagcttcctcgcaactttgtggtagattactatgagaccagcagcctctgctcccagccagctgtggtattccaaaccaaaagaagcaagcaagtctgtgctgatcccagtgaatcctgggtccaggagtacgtgtatgacctggaactgaactgagctgctcagagacaggaagtcttcagggaaggtcacctgagcccggatgcttctccatgagacacatctcctccatactcaggactcctctccgcagttcctgtcccttctcttaatttaatcttttttatgtgccgtgttattgtattaggtgtcatttccattatttatattagtttagccaaaggataagtgtcctatggggatggtccactgtcactg

SEQ ID NO: 737 - DNA, 565 bp, homo sapiens
aatgctcagaagttgcctatgtgtgacaaatgtggcactgggattgttggtgtgtttgtgaagctgcgggaccgtcaccgccaccctgagtgttatgtgtgcactgactgtggcaccaacctgaaacagaagggccatttctttgtggaggatcaaatctactgtgagaagcatgcccgggagcgagtcacaccacctgagggttatgaagtggtcactgtgttccccaagtgagccagcagatctgaccactgttctccagcaggcctctgctgcagctttttctctcagtgttctggccctctcctctcttgaaagttctctgcttactttggttttccctctgcttgtaaaacattgagtcccctccctgccttggttaattgactcacaccagctgtgcgatgcccgcttttacaattaaaggaaaactgttttgttcagtgtcaccttgtcagcaacactgtgtcccttcgccccaccgttcttctctgctgcatttggacatcagccaaatttgaacccaatcaaatataacgtgtctgacactgattttgtttttact

SEQ ID NO: 738 - DNA, 483 bp, homo sapiens
  misc_feature (30)..(30): n is a, c, g, or t
gtctgggcacaggcatttctgccaagtctngttagatctccaggtcagggcacagcactggctctacatttaccaggtcttacgccaacaatagctgacaattccaagaagcttcacgtgtgggtagttttaattcagtttaagtattgctttttgttcaggtgacaaatgagatcagctctccttccagaacgaaagggctgataatttttggccttagttccaggtagattaaaaagctgctagctcacatacaggacagccagcagtaggctgtggagcgggtaggagagagatggctgatactgctcacgtgcgctgcaggaaaagcaatcagtcacaactcacctagcgacctgacttactctggaatcttggcgggcatcgccgaccctattattccattaccaggcactccgccacccacatgccaactgacttgatgcttaataaaactgctgctgcctgtttgattctatttaa

SEQ ID NO: 739 - DNA, 412 bp, homo sapiens
atgggaaaatgctccgaccctcaatgcagtaaatatttacttgcaggcaactgggttctcatctcttgatttgcttttgtaatcagcaataataaaatagcaggtagatggatgacagttgctcattctgagaaacttcactcttttcacttatgcatcacgaggaaataactaaaatacataccaagagaaaaataccttgccatcggatcatcaacaagtcttctatttacaaacttcaaaaaacacaaaacaacattcatgttttaaatgctttctacttgtggttcaagaagcactagatttagtaagaaactctacctatatacttagtttgaagttagtaacttcctgagatgctaaagacttacagcctgcgattatacaaggatttacacatgcttcctctggt

SEQ ID NO: 740 - DNA, 418 bp, homo sapiens
gatcaggaggagacagccggcgttgtgtccacccccctcattaggaacggtgactggaccttccagatcctggtgatgctggaaatgactccccagcgtggagatgtctacacctgccacgtggagcaccccagcctccagagccccatcaccgtggagtggcgggctcagtctgaatctgcccagagcaagatgctgagtggcgttggaggcttcgtgctggggctgatcttccttgggcttggccttatcatccgtcaaaggagtcggaaagggcttctgcactgactcctgagactgttttaactaagactggttatcactcttctgtgatgcctgcttgtccctgcccagaattcccagctgcctgtgtcagcttgtccccctgagatcaaagtcctacagtggctgtcacgca

SEQ ID NO: 741 - DNA, 555 bp, homo sapiens
catttccttcatccagaacgttctgtggacatcactgctctaggttcctcccttatggagtctcacaagactgtctagccagcaagatctcttttccaaccaggccaggagcacctctccacccactgctgctggtctgaccgccttcctggaagtccctcttgaggcaggccctggagttagaagctgggcagaggcacccacagccttatcctttgccaatctctgactcaatgccacggccactgtagtgagctgaaccacctccagcagtcccctggcagaagcacctggaaaacatgcaatgggaaccttcaccctgaggccaggcccttcccatgctacccaacagtagacaggacaccctgtgttgttggctgcaccggggtgctgggatctgtggatccctggggcctggaagccactctcagcacatacagccactgtgttccgaggtccagtcagctggccgggaaggaattcaacacagccaaggacagaggtccatatgatgacgggtggatgctcgtgtgactttgctgaccttttatgttt

SEQ ID NO: 742 - DNA, 463 bp, homo sapiens
ttccaacatcctgcaggggctgtggggccagagcccacagacagaggcctgcagtggaggtccagcccagctgccgacgcccaggaagaaaacctctatgctgccgtgaaggacacacagcctgaagatggggtggagatggacactcgggctgctgcatctgaagccccccaggatgtgacctacgcccagctgcacagcttgaccctcagacggaaggcaactgagcctcctccatcccaggaaagggaacctccagctgagcccagcatctacgccaccctggccatccactagcccggagggtacgcagactccacactcagtagaaggagactcaggactgctgaaggcacgggagctgcccccagtggacaccaatgaaccccagtcagcctggacccctaacaaagaccatgaggagatgctgggaactttgggactcacttgattctgcagtcga

SEQ ID NO: 743 - DNA, 273 bp, homo sapiens
gcaagaggaaggcggtccagggcgcccaacagcccagcctctaccagatccgcaccaacggcagcgccctctgcacccggtgcatccagatcaacaccgactccagcctcctcaactccgagttctgcttcatcctcaaggttccctttgagagtgaggacaaccagggcatcgtgtatgcctgggtgggccgggcatcagaccctgacgaagccaagttggcagaagacatcctgaacaccatgtttgacacctcctacagcaagcaggtta

SEQ ID NO: 744 - DNA, 448 bp, homo sapiens
tcacagtgactcccaaatcctttgggtcacctggatccctggggaagctgctttgtgaggtgactccagtatctggacaagaacgctttgtgtggagctctctggacaccccatcccagaggagtttctcaggaccttggctggaggcacaggaggcccagctcctttcccagccttggcaatgccagctgtaccagggggagaggcttcttggagcagcagtgtacttcacagagctgtctagcccaggtgcccaacgctctgggagagccccaggtgccctcccagcaggccacctcctgctgtttctcacccttggtgtcctttctctgctccttttggtgactggagcctttggctttcacctttggagaagacagtggcgaccaagacgattttctgccttagagcaagggattcaccctcgccaggctcagacgcaagatag

SEQ ID NO: 745 - DNA, 488 bp, homo sapiens
cctccagtctggatcgtttgacgggacttcaggttctttctgaaatcgccgtgttactgttgcactgatgtccggagagacagtgacagcctccgtcagactcccgcgtgaagatgtcacaagggattggcaattgtccccagggacaaaacactgtgtcccccccagtgcagggaaccgtgataagcctttctggtttcggagcacgtaaatgcgtccctgtacagatagtggggattttttgttatgtttgcactttgtatattggttgaaactgttatcacttatatatatatatacacacatatatataaaatctatttatttttgcaaaccctggttgctgtatttgttcagtgactattctcggggccctgtgtagggggttattgcctctgaaatgcctcttctttatgtacaaagattatttgcacgaactggactgtgtgcaacgctttttgggagaatgatgtccccgttgtatgtat

SEQ ID NO: 746 - DNA, 546 bp, homo sapiens
catcgcggaagccctcagcaagatgaagctgcagcccttcgccacagaggcagatgtggaggaggccctgcggctcttccaagtgtccacgttggatgctgccttgtccggtaccctgtcaggggtggagggcttcaccagccaggaggaccaggagatgctgagccgcatcgagaagcagctcaagcgccgctttgccattggctcccaggtgtctgagcacagcatcatcaaggacttcaccaagcagaaatacccggagcacgccatccacaaggtgctgcagctcatgctgcggcgcggcgagatccagcatcgcatgcagcgcaaggttctctaccgcctcaagtgagtcgcgccgctcactggactcatggactcgccacgctcgccctccttgccgctgcctgccattgacaatgttgctgggacctctgcctccccactgcagccctcgaacttcccaggcaccctcctttctgccccagaggaaggagctgtagtgtcctgctgcctctgggcgcccgctctagcgggttctgggaa

SEQ ID NO: 747 - DNA, 496 bp, homo sapiens
  misc_feature (418)..(418): n is a, c, g, or t
tttccctcccttaaaatggcatagctgagaaagccccggtactactaattgagatgatctgcttaagagtcttcatattctgaactcgaaaggccttttatgttatattattgctcgctttacgcaactccaaattgctttcctatttaaatgaatgttcttctagtaaactggtgttagatttaaagaaatcactcaagcttcaccttggtaaactgaactcagtttaagattaagaaactgatttcggccgggtgcggtggctcacgcctgtaattccagcactttgggaggcccgggcgggcggatcacctgaggtcaggagttcaagaccagcctgactaatatggtgaaaccccgtttctactaaaaatacaaaaaaattagccgggtgtcgtggcttgtgcctgtagtcccngctactccggagtctgagacaggaaaattgcttgaacccgggaggcggaggttgcagtatgccgagatcgctgcactt

SEQ ID NO: 748 - DNA, 502 bp, homo sapiens
cagcagaggtcacaagcacctcccagagccctcactctccagattccagtcagagctccctggctcaggaggaagaggaggaagaccaagggagaaccaggaaacggaaacagagtggtcattccccagcccgggctggaaagcagcgcatgaaggagaaagaacaggagaatgaaaggaaagtggcacagctagctgaagagaatgaacggctcaagcaggaaatcgagcgcctgaccagggaagtagaggcgactcgccgagctctgattgaccgaatggtgaatctgcaccaagcatgaacaattgggagcatcagtcccccacttgggccacactacccacctttcccagaagtggctactgactaccctctcactagtgccaatgatgtgaccctcaatcccacatacgcagggggaaggcttggagtagacaaaaggaaaggtctcagcttgtatatagagattgtacatttatttattactgtccctatctatta

SEQ ID NO: 749 - DNA, 417 bp, homo sapiens
  misc_feature (216)..(216): n is a, c, g, or t
aagcctgactgggacctcaagagagatgtggccaagaagctggagaaactaaaaaagcggactcagagggccattgccgagctgatccgtgaaaggctgaaaggccaggaagacagcctagcctctgcagtggatgctgccaccgaacaaaagacctgtgactccgactgaggcatgccctgccccaccactcgcccatcaggcctgtcctgcagnggatggtcttgggcagggatgggggctaggcttgccatcacctccagtttggcttctgagcagagactccctgcccatcaagtctgaaacccccatggatgaggtcagctccttgtctgctgggtggcccctgccattctgaatggaggcagaaccagcaacaactctgggcgtgcctgtgtctgcacatgtggatgtaca

SEQ ID NO: 750 - DNA, 543 bp, homo sapiens
tgtttatttattgcacggatctaagttattctccccagccagagcccgagctcctgctccctgggaaaagtggcgtatggccctgagctgggctttatattatatatctgcaaataaatcacattttatcttatatttagggaaagccggagagcaacaacaaaaaatgtttaagccgggcgcggtggctcacatctgtaatcccagcactttgggagtccaaggagggggatcgcttgagtccaggagtttgagaccagcctggacaacatggtgaaaccccgtctctacaaaaaatacaaaaattagccatgcatggtggctcatgcctgtagtcccagctacttgggaggctgaggcaggaggatcacttaagcccagaaggcagaggttgtagtgagctgagatcgcaccactgcactccagcctgggcaacatagcaaaatcctgtctcaaaaaaaaagttaaaaaatattgcccggctcctagaatttatttatttcctgacttacagcaagcgagttatcgtcttctgtattttgt

SEQ ID NO: 751 - DNA, 244 bp, homo sapiens
ccacgcactagctcggttattggttatgccaaaggcactctccatctcccacatctggttattgacaagtgtaactttattttcatcgcggactctggggaagggggtcactcacaagctgtagctgccatacatgcccatctagcttgcagtctcttcgcgctttcgctgtctctcttattatgactgtgtttatctgaaacttgaagacaagtctgttaaaatggttcctgagccgtctgta

SEQ ID NO: 752 - DNA, 268 bp, homo sapiens
agcagatcatgaagacaggggcccttttgcttcaggggatgattgccgccgtggacacagactccccccgagaggtctttttccgagtggcagctgacatgttttctgacggcaacttcaactggggccgggttgtcgcccttttctactttgccagcaaactggtgctcaaggccctgtgcaccaaggtgccggaactgatcagaaccatcatgggctggacattggacttcctccgggagcggctgttgggctggatccaagacca

SEQ ID NO: 753 - DNA, 468 bp, homo sapiens
tctgcagtgagtgcaaccgcaccttccccagccacacggctctcaaacgccacctgcgctcacatacaggcgaccacccctacgagtgtgagttctgtggcagctgcttccgggatgagagcacactcaagagccacaaacgcatccacacgggtgagaaaccctacgagtgcaatggctgtgacaagaagttcagcctcaagcatcagctggagacgcactatagggtgcacacaggtgagaagccctttgagtgtaagctctgccaccagcgctcccgggactactcggccatgatcaagcacctgagaacgcacaacggcgcctcgccctaccagtgcaccatctgcacagagtactgccccagcctctcctccatgcagaagcacatgaagggccacaagcccgaggagatcccgcccgactggaggatagagaagacgtacctctacctgtgctatgtgtgaa

SEQ ID NO: 754 - DNA, 527 bp, homo sapiens
ggcaatggtagatccacccttatgcttgctcagtttagcataacctcttatggattttcatcaaattcagcgtgttggtcactggaaagagccttttccttctccttttcttactctcccctcatggtgttcccctcttaaaggaggaggagcttttaatttacacttaccacctcatttgcttttctggaggccatgcaatataggcgggactacagagttaatctcctttttacaaatgaggccaagagaagcctcattggttcacagtcatgcagctcatactgtccacccttgtattctcagatgcaggacaattgcattttagttttattttgtggaggtgcagaatatttactctttctgtccaacccttgattctgccgaggaagacactgatggtttgatgagtgattcagctgtttttggctaagggcttttggagctgatggcaggggtttgatgaatccaaatgagctctagacattatcacagactgaatagatcttaactgtctcctacatgtg

SEQ ID NO: 755 - DNA, 448 bp, homo sapiens
gcagatgtacaactcaccataccaccgggtgacagactgtgtacgggcagtgtggcaaaatgaaggggccggggccttttaccgcagctacaccacccagctgaccatgaacgttcctttccaagccattcacttcatgacctatgaattcctgcaggagcactttaacccccagagacggtacaacccaagctcccacgtcctctctggagcttgcgcaggagctgtagctgccgcagccacaaccccactggacgtttgcaaaacactgctcaacacccaggagtccttggctttgaactcacacattacaggacatatcacaggcatggctagtgccttcaggacggtatatcaagtaggtggggtgaccgcctatttccgaggggtgcaggccagagtaatttaccagatcccctccacagccatcgcatggtctgtgtatgag

SEQ ID NO: 756 - DNA, 500 bp, homo sapiens
gagcagattctagcacatcatggcagtgaccaagcgtggtcccgagaagggccagagcctggtagagactagggaagggaggtctcctctagactgactcacattgccttgagcttttcagttaagttgctgtaagcacctgggctgaggaggctgtttttgttccttcctgcgttatagcggggccttgtctcttcctctgcaggacacagatctggaggacgtggactggggtaggaaaccacctgagggtgttagtacctagtggtgaaatggatgaggtcatttctaaggtgtgttgcccgtggatctgggcacaatcattggaattccttggagccactgggattcatggctttgtatccaactgcatccaggcctgaggctgctgacgtttgacaccaggccagtagagagtgcccttttgtatcttaagccaagaagtgaggcctgggggtgggggagggggaaggggtgggagccaatactgagtgcctgca

SEQ ID NO: 757 - DNA, 456 bp, homo sapiens
gactaaaaccactcttagcatctcctctagtattttccatgtatcaggacagaggtgtcttatgtagggagggggcaagtatgaagtaaggtaattatatactactctcattcaggattcttgctcccatgctgctgtcccttcaggctcacatgcacaggaatgctacatgatggccagctgcttccctccttggttatcatccactgcagctgctagttagaaaggtttggagggatgacttttagtaaatcatggggattttattgatttattttcacttttgggattttgtggggtgggagtggggagcaggaattgcactcagacatgacatttcaattcatctctgctaatgaaaagggttctttctcttgggggaaatgtgtgtgtcagttctgtcagctgcaagttcttgtataatgaagtcaatgccatcaggccaaggaaataaaa

SEQ ID NO: 758 - DNA, 490 bp, homo sapiens
agcagctagtccatagcacagccttataactgtaaagccaggcattgcccatgagcagagctggaaccagagcttcagtcagtaagagggaggattaccttcaggagaaggcaaggaagaaaactggctgctatctttatagttccactgccctaaccaagtgtccacattctaaatgtgtagtgtccatcccttatgtaatagtggtttcccgcccaaagtgagactttccttttaattggagaagggtatagaggtagtccaggtgggaacgccagaagtgctgattgcccagccattgggaccacctgttcttgccccactaccctctagtgggaggccaaagtaaaggctggctggtgggtgtctgtggattgaggatgtggcagggactggtcctcccacctccctctggccaaagatgggctttgcccgctgtgtgcctgtcaccacccaccagcagtcatgccctgggcttcccaaatggaga

SEQ ID NO: 759 - DNA, 561 bp, homo sapiens
cgccactatcgggagcaccagaagggccggcccaccagcaccaaccccatcgccagcatctttgcctggacacgtggcctggagcaccgggggaagctggatgggaaccaagacctcatcaggtttgcccagatgctggagaaggtgtgcgtggagacggtggagagtggagccatgaccaaggacctggcgggctgcattcacggcctcagcaatgtgaagctgaacgagcacttcctgaacaccacggacttcctcgacaccatcaagagcaacctggacagagccctgggcaggcagtagggggaggcgccacccatggctgcagtggaggggccagggctgagccggcgggtcctcctgagcgcggcagagggtgagcctcacagcccctctctggaggcctttctaggggatgtttttttataagccagatgtttttaaaagcatatgtgtgtttcccctcatggtgacgtgaggcaggagcagtgcgttttacctcagccagtcagtatgttttgcatactgtaatttatattgcccttggaacacatggtgcca

SEQ ID NO: 760 - DNA, 428 bp, homo sapiens
  misc_feature (372)..(372): n is a, c, g, or t
  misc_feature (384)..(385): n is a, c, g, or t
ccatgtgcaagtctgtggtggcccctgccacggatggtggcctcaacctgacctccaccttcctcaggaaaaaccagtgtgagacccgaaccatgctgctgcagcccgcggggtccctcggctcctacagctaccggagtccccactggggcagcacctactccgtgtcagtggtggagaccgactacgaccagtacgcgctgctgtacagccagggcagcaagggccctggcgaggacttccgcatggccaccctctacagccgaacccagacccccagggctgagttaaaggagaaattcaccgccttctgcaaggcccagggcttcacagaggataccattgtcttcctgccccaaaccgataagtgcntgacggaacaannataagtgcatgacggaacaataggactccccagggctgaagct

SEQ ID NO: 761 - DNA, 388 bp, homo sapiens
cctcagtgttgcttctcacagaagctgcgactctagaccaggcctgcagccagaacgccgattccgggagcttgggagccctgcgtcagggcccagagcctcgcacttgctgtgtgcgaagatcgccttgctttactgtgaccacagccccgacgcggggctgtttaacaagaacttcagcgcagccggcgtttctgttaccccggccgcggctcttggcggcgggagaggcgcagtggctgcaggctgccccctgccggccacaagggagcagcgtccgcgccgccgcccaccggccctcccgccagctcctcagcctgctccctgggaggcaggctccagaagcaccccgacggggggccttattaagtgcgagaagcctctccag

SEQ ID NO: 762 - DNA, 238 bp, homo sapiens
ttgctgtttcaatagggcttcatcagcctgagttctttattagaattgacctgcatcaatccagtgcccccctcataccacctactagggaaggctgcattctacattacggtcttcagggatcctctctggggccccacatgcttccctttttgtttacctgtgtctcggggcaattttaatcttagtcttatacttttcatttaagcaggttaggctacactatacacttacagat

SEQ ID NO: 763 - DNA, 525 bp, homo sapiens
  misc_feature (329)..(329): n is a, c, g, or t
  misc_feature (378)..(378): n is a, c, g, or t
  misc_feature (380)..(381): n is a, c, g, or t
  misc_feature (383)..(385): n is a, c, g, or t
  misc_feature (389)..(394): n is a, c, g, or t
gctatgcgcccagtggagcttttgggcgctgggtctccagggatagacagtgctagctttgggtatgagctgcaggttttcgaagccttcagcctaccttcctggcatgaaagaacttgagtatataaaggtaaatctcaggggaggggacgtaataggccagggtttagtgaaagctctaatattactcaaagcgctccccaaagacctgccctccaaagacttgcgcccccaaagacctttcttggcccggctgctgagcctttccccaaacgagccagggaactttgcccacgtcattttacctccgagaatgtgcctacctcacnagggttgttgtgaggactaaatgaagtaaagtgttttgtcaagcgtaanannannnaaannnnnnattattcgtctgagcttattgtataaaataatgagttgagcagaaatcaaaaagactgtcacctttcaccatgttgattgtcggcattactgcagtattttatatttacagcgtatttttcagcaagccaa

SEQ ID NO: 764 - DNA, 461 bp, homo sapiens
atgaagccaaagccagctcttccatcttaatcgacgaatcagagcctaccacaaacatccaaattcggcttgcagacggcgggaggctggtgcagaaatttaaccacagccacaggatcagcgacatccgactcttcatcgtggatgcccggccagccatggctgccaccagctttatcctcatgactactttcccgaacaaagagctggctgatgagagccagaccctgaaggaagccaacctgctcaatgctgtcatcgtgcagcggttaacataaccgcccagccagctgcctggcctccctcctgtgtttcccatgccagtggccatgccccatggggatcgcccctcctgcccccttgtgcacacccagcagtccagtgcaacgtctcctccatagctctgggttcttagatcttggttggacgtttgttttctccttagttgcatttcctgggtt

SEQ ID NO: 765 - DNA, 429 bp, homo sapiens
gtagtcccagctgtcagacatttaaaccagagcaactccatctggaataggagctgaataaaatgaggctgagacctactgggctgcattctcagacagtggaggcattctaagtcacaggatgagacaggaggtccgtacaagatacaggtcataaagactttgctgataaaacagattgcagtaaagaagccaaccaaatcccaccaaaaccaagttggccacgagagtgacctctggtcgtcctcactgctacactcctgacagcaccatgacagtttacaaatgccatggcaacatcaggaagttacccgatatgtcccaaaagggggaggaatgaataatccaccccttgtttagcaaataagcaagaaataaccataaaagtgggcaaccagcagctctaggcgctgctcttgtctatggagt

SEQ ID NO: 766 - DNA, 245 bp, homo sapiens
tgggtgaggacaagttccagtggctggcgggcctggcgccgccctcgctcttcgcgcgcgccatgcaggtgctggtcaccgccatctctccaggccgcttccccgaggccctggacgagctgccgctgcccccattcctgcagccgttggacctcactggcaaaggctaggcccggagcaccctaggcgctggattttgggacaaaactatttttcagagcgttgtaccggcactttatatatat

SEQ ID NO: 767 - DNA, 153 bp, homo sapiens
acgccaagacagacacgctgcagatcgaggactttctggaggagacgctggggccgcccgacttccccagcctggcgcctcgttacagggagtccaacaccgccggcaacgacgttttccacaagttctccgcgttcatcaagaacccggtgc

SEQ ID NO: 768 - DNA, 516 bp, homo sapiens
acagccgatctgctgcaggtcagcaactgtgtcgtgagcagctgccaaccaccagcctttctggtgctgttctccagttcacgtctgccagctggtgagggcagaggcagacctggtcagacccagcgcccctcctccctgagggagcatggcacagcctcacacttgaaagacggtgtttggtttcccatctaatcaacttaagggaagccggcatgtacccttcaaggccctgtcaccacctattttcctgatcagttggtataaactgagggtggcttttagagacccagacttggttggcagcgctgccatggaacaccccagcaagcacctcccagcctgcctttcggagcagcacccaggaggggatgccgcgctccagcaacaccaggtcaggcctgtgcagacccctgccctgccgctgcagaaatccagaagcatccttaatgcttctcagtcttcagccagagggagggctgttatttccagaggtgcgctttttatgtactttta

SEQ ID NO: 769 - DNA, 525 bp, homo sapiens
caactgcccttgaccggaagcatgagtatcatcttcttcctgcccctgaaagtgacccagaatttgaccttgatagaggagagcctcacctccgagttcattcatgacatagaccgagaactgaagaccgtgcaggcggtcctcactgtccccaagctgaagctgagttacgaaggcgaagtcaccaagtccctgcaggagatgaagctgcaatccttgtttgattcaccagactttagcaagatcacaggcaaacccatcaagctgactcaggtggaacaccgggctggctttgagtggaacgaggatggggcgggaaccacccccagcccagggctgcagcctgcccacctcaccttcccgctggactatcaccttaaccagcctttcatcttcgtactgagggacacagacacaggggcccttctcttcattggcaagattctggaccccaggggcccctaatatcccagtttaatattccaataccctagaagaaaacccgagggacagcagattccacag

SEQ ID NO: 770 - DNA, 543 bp, homo sapiens
ggtcaggggatcagacactccagttgggtcttttatataaattaaatggcaaaaggctccatacccttctccttctttcctaccctccactttatctgcaaaatgggaatgatgataacacccacttcatagaatggtcatgaagatcaaatgagagaataaaagtcaagcacttagcctctggtgcacaataagtattaaataagtatacctattcctccttttccttttttaaaaataatattaccaaatgtccagcttatacacatttacaagacttagctagtgggctatgttagagctactaaaagatctttgacaagctaaaactaagatgcaatgaatgaggtgtaacgaacaagagagttttaagttcagaaatggttacagaagtataagacagctgtgtgggtgttttttggtttttggtttctggtttacaatctcgtcattcaacaaagatgggagttttatagaactaaaagcaccatgtaagctactaaaaacaacaacaaaaaaggctcatcatttctcagtctgaat

SEQ ID NO: 771 - DNA, 386 bp, homo sapiens
  misc_feature (351)..(351): n is a, c, g, or t
tggggaagagagctcactccccatgcgggcgcgggacactccatctctgttcctgccggtcgggtccgcaaacaccggggatcccagctgcggcgcccaaagggttaacgcaggcgttcggccagtgcaaaccggcctcgcaggatccgcgcttaaaatccgggtgttttcattttgggtttgtttcttctactatgccaagctggtggctctcttttaattctcttgtaacatctcaaccctgcacccatctttcctgaggggaaaaggaaacgggataacttgcggtatttcgatgctcaaaggtaaccggcggctctgctccaaccttcaagagattttgcaagttgnaaaaaaaaaaaaaaccatccttcgtaacatctact

SEQ ID NO: 772 - DNA, 348 bp, homo sapiens
  misc_feature (189)..(189): n is a, c, g, or t
acataccttgggttgatccacttaggaacctcagataataacatctgccacgtatagagcaattgctatgtcccaggcactctactagacacttcatacagtttagaaaatcagatgggtgtagatcaaggcaggagcaggaaccaaaaagaaaggcataaacataagaaaaaaaatggaaggggtggnaaacagagtacaataacatgagtaatttgatgggggctattatgaactgagaaatgaactttgaaaagtatcttggggccaaatcatgtagactcttgagtgatgtgttaaggaatgctatgagtgctgagagggcatcagaagtccttgagagcctcc

SEQ ID NO: 773 - DNA, 480 bp, homo sapiens
ctggacccgtgaagtcttcagctcctgcagctctgaagtggttctgaacacaccacagccatcagcactggaatgcaaagaccagaacaaacagaaggaagccagcagccaagccggggcagtttcagtctccaccccaaatgcaggactgtagaagcggccaggaagaaaaccaccccctcttaaggttgtttttgtgaccgttctttggagcattgttctaaaaatgggaaattacatattgctgtgccaagggcaacaaacacctgcagttaaaggaataccttccgcgaggcggcttttcggagcatgcatgtttatagctccagccaggccagaccgagggctgctgcataagccctgcttggtgcatttcttcacttgcaaggggacagagtgtgggcttaggtttgggactagagggggctttggcaactatggtgctcaggtgattatccttcgctcgtttatccaataaac

SEQ ID NO: 774 - DNA, 532 bp, homo sapiens
agggctttgtaatcttacatcccttgataaaagatactacagtcaatctcctgtagtagttccacagttccatagattacatttttccttggagcatcctatatgcagcatagtttagtggttaagagcaaatacttcctgaatttaaatcctggctctgccacttaactatgtgatcttgggcaagatatttactcactttatacctaagttcctcgtatatgaaacagaggtgataataatagttcctacttcataggattgttgagaggattacatgtaaagtaccaggacagtgcatggcacatgtaagtatttgctttaataataattatggttctgttagtcctgataatctcatgttttatctacacatttacacctacttctaaaagcagtggatatatttctttttggaattgtgtaaacaaaaaaaataataattaataccgtaggtttctctcctcattttccagaagcagcagttaccaatagaactgaattccgaaattatgaattctggctagtctta

SEQ ID NO: 775 - DNA, 555 bp, homo sapiens
cggggttttttgagagcttcacagtgcagccgcgagtccatcctaaggtgactgtgtatcctgcaaagacccagcccctgcatcaccgcaaccccctggtcggctctgtgagtggtttctatccaggcagcattaaagtcaggtggttccagaatggtcaggaagagaaggctgcggtggtctccataggcctgatccagaatggagattggaccttccagaccctggtgatgctggaaacagttcctcggagtggagaggtttacacctgccaagtggagcatccaagcgtgacgagccctctcacagtggaatggagtacacggactgaatctgcacagagcaagatgctgagtggagtcgggggctttgtgctgggcctgctcttccttgggacagggctgttcatctacttcaggaatcagaaaggacactctggacttcagccaacaggactcctgcgctggactcctgagctgaagtgcacatgaccacattcaaggaagaaccttctgccacagctttgcaggatgaaaagctttcccacttggctct

SEQ ID NO: 776 - DNA, 545 bp, homo sapiens
taggagttgtccagtatgttgtaaatcatttgctacaaaagcgaatgtaaggaggcattttgatgaagttcatagaggactaaggagggattcaattactcctgatatagcaacaaagcctgggcaacctttgttcctggattctatttctcctaaaaaatcttttaagactcgaaaacaaaagtcttcttcaaaggctgaatacaatttaactgcatgcaaatgcctcctttgcaagaggaaatatagttcacaaataatgcttaaaagacatatgcaaattgtccacaagataactctttctggaacaaactctaaaagagaaaaaggccctaataatactgccaacagttcagaaataaaagttaaagttgaaccagcagattctgtagaatcttcacccccttccattacccattctccacagaatgaattaaagggaacaaatcattcaaatgaaaaaaagaacacaccggcagcacagaaaaataaagttaaacaagactctgaaagccctaaatcaactagtccgtcggctgcaggtg

SEQ ID NO: 777 - DNA, 414 bp, homo sapiens
ctctggcctcagtgttacagctaaataatctttaattaaggcaagtcactttcttcttcttaaagctgtttctagtttgagaaatgatgggattttagcagccagtcttgaaggtctctttcagtatcaacattctaagatgctgggacttactgtgtcatcaaatgtgcggttaagattctctgggatattgatactgtttgtgtttttagttgggagatctgagagacctggctttggcaagagcagatgtcattccatatcacctttctcaatgaaagtctcattctatcctctctccaaacccgttttccaacatttgttaatagttacgtctctcctgatgtagcacttaagcttcatttagttattatttctttcttcactttgcacacatttgcatccacatattag

SEQ ID NO: 778 - DNA, 467 bp, homo sapiens
ctacagcgccttgtgagcaggacggccagcaagtacacagaccgggccctgcgggccagctacacaccatccccagcacgctccacccacctcaagaccccggccagtgggctgcagacccccacaagcacaccggcgcctggctctgccacacgcacccctctcacacaggacccggcctccatcacggacaacctgctgcagctccctgcccggcgcaaagcttcggacttcttttagagccaggcctgggctgggctcatagacgcttcacagagcctgcagggcagctgtacacccagcagaggactccagccttctcggggcccaggcctgggccagaagctgttgaccataccaggagtcactggagaaaggggctgtgctggggccagactggcacaaggcactcgtgcccacaccacaccccagggccttgccaagctgtttgctgtttaattggcccc

SEQ ID NO: 779 - DNA, 393 bp, homo sapiens
  misc_feature (40)..(40): n is a, c, g, or t
  misc_feature (144)..(144): n is a, c, g, or t
  misc_feature (148)..(148): n is a, c, g, or t
  misc_feature (340)..(340): n is a, c, g, or t
accaacctacacagcgttatccaggcccaacttccggtanctccgagagaagccatgagagacaagtctcttagagccacagaagtagaccttccagagccccagtttgtaaatgaacctgtgtcacatttgataaacactatncctnggcgcagccccgggccaccgccgagtgacgccaaagccctggttgactctgacagccccgtgggtgtgtgggaggccgggcgctctggggtctgtctgtcagtgcaatcgtttagtgttttttcagtggggcggggcgggaagcgggtgggaccgggcagccagttctcaaaggctgtggggccgactggangccacagcccctcacccctagacgttgccaaccagaactgacgtgtgacctcc

SEQ ID NO: 780 - DNA, 329 bp, homo sapiens
cccacagcatcaagcctgtttgctcagcgactaaagacacttcgggacaaagatggcttcggggctgtgctcttttcaagccatgtccgcaaggtgaaccgcttccacaagatccggaaccgggccctcctgctcacagaccagcacctctacaagctggaccctgaccggcagtaccgggtgatgcgggccgtgccccttgaggcggtgacggggctgagcgtgaccagcggaggagaccagctggtggtgctgcacgcccgcggccaggacgacctcgtggtgtgcctgcaccgctcccggccgccattggacaaccgcgttgggga

SEQ ID NO: 781 - DNA, 547 bp, homo sapiens
tccatttctcatgttttccattgtttgaaacaaagaaggttaccaagaagcctttcctgtagccttctgtaggaattcttttggggaagtgaggaagccaggtccacggtctgttcttgaagcagtagcctaacacactccaagatatggacacacgggagccgctggcagaagggacttcacgaagtgttgcatggatgttttagccattgttggctttcccttatcaaacttgggcccttcccttcttggtttccaaaggcatttattgctgagttatatgttcactgtccccctaatattagggagtaaaacggataccaagttgatttagtgtttttacctctgtcttggctttcatgttattaaacgtatgcatgtgaagaagggtgtttttctgttttatattcaactcataagactttgggataggaaaaatgagtaatggttactaggcttaatacctgggtgattacataatctgtacaacgaacccccatgatgtaagtttacctatgtaacaaacctgcacttatacccatgaact

SEQ ID NO: 782 - DNA, 467 bp, homo sapiens
  misc_feature (68)..(68): n is a, c, g, or t
atttctggtttgaggctgtgggtcccacccactcagctcactcgggcctctggccaacagggcatggngacatcatatcaggctacatccacgtgacgcagaccttcagcattatggctgttctgtgggccctggtgtccgtgagcttcctggtcctgtcctgcttcccctcactgttccccccaggccacggcccgcttgtctcaaccaccgcagcctttgctgcagccatctccatggtggtggccatggcggtgtacaccagcgagcggtgggaccagcctccacacccccagatccagaccttcttctcctggtccttctacctgggctgggtctcagctatcctcttgctctgtacaggtgccctgagcctgggtgctcactgtggcggtccccgtcctggctatgaaaccttgtgagcagaaggcaagagcggcaagatgagttttgagcgttgtattcca

SEQ ID NO: 783 - DNA, 503 bp, homo sapiens
aacagaaatcgcatcaaggtgaccaaagatggctatgcagacattgtggatgtcctgaacagccctttggaaggacctgaccagaagagcttcattcctgtggaaagggcagagagcaccttcctgttcctggtaggtcaggatgaccacaactggaagagtgagttctatgctaatgaggcctgtaaacgcttgcaggcccatgggaggagaaagccccagatcatctgttacccagagacagggcactatattgagcctccttacttccccctgtgtcgggcttccctgcatgccttggtgggcagtcctattatctggggaggggagcccagggctcatgccatggctcaggtggatgcttggaaacaactccagactttcttccacaaacacttgggtggccgcgaggggacaatcccatcaaaagtgtaaattttatttgatcatgtggcctctctgttgctaatctctcctggaaacatctgccacatttagtgtgt

SEQ ID NO: 784 - DNA, 389 bp, homo sapiens
tgctggtctaatttggaccccctgcctctcagtgcccctgccctaggggtgtctgtctccagaggggagggacaaatcccctactggggccatttcaatggggtagtttttggatttttttccccactcactttttattttttaatgataatggagatgtctggacccttcctcaccccacctgtcggtcttgtcctggctctgcctgtcccccaccgttgttctcgtaggtgaaccccaggtcctcaactccccccctttatgtgttgaaagttaatggtttcagatgtgaacatcacgtgttataactgtagcgctgtaaatttttttgtgggagggtgggcagggaggggtcccagagggtagagctcaaggattttgggttttgt

SEQ ID NO: 785 - DNA, 454 bp, homo sapiens
ccactatctagctatgaccacgttgctcctggagatgagtacgccctttacctgcgtttcctggatgctcttaaaggcgggctggtccgagtctctgttttggaagctcaaccagtggctgatgattcacatgtttcactgccgcatggttctaacctaccacatgtggtgggtgtgtttctggcactgggacggcctggtcagcaacctgtatctgcctcatttgacactgttccttgtcggactggctctgcttacgctaatcattaatccatattggacccataagaagactcagcagcttctcaatccggtggactggaacttcgcacagccagaagccaagagcaggccagaaggcaacgggcagctgctgcggaagaagaggccatagctgctccagccggggctccggggcggcagcagagctggcacaccgattctgggaagcccc

SEQ ID NO: 786 - DNA, 543 bp, homo sapiens
aggtccgagccatcctagaggatctggggctacccctgacctcagatgacgccctgatggtgctagaggtgtgccaggctgtgtcccagagggctgcccagctctgtggggcgggtgtagctgccgtggtggagaagatccgggggaaccggggcctggaagagctggcagtgtctgtgggggtggatggaacgctctacaagctgcacccgcgcttctccagcctggtggcggccacagtgcgggagctggcccctcgctgtgtggtcacgttcctgcagtcagaggatgggtccggcaaaggtgcggccctggtcaccgctgttgcctgccgccttgcgcagttgactcgtgtctgaggaaacctccaggctgaggaggtctccgccgcagccttgctggagccgggtcggggtctgcctgtttcccagccaggcccagccacccaggactcctgggacatcccatgtgtgacccctctgcggccatttggccttgctccctggctttccctgagagaagtagcactcaggttagcaatat

SEQ ID NO: 787 - DNA, 481 bp, homo sapiens
aacattgtaatggccatcgctggaaacaagtgcgacctctcagatattagggaggttcccctgaaggatgctaaggaatacgctgaatccataggtgccatcgtggttgagacaagtgcaaaaaatgctattaatatcgaagagctctttcaaggaatcagccgccagatcccacccttggacccccatgaaaatggaaacaatggaacaatcaaagttgagaagccaaccatgcaagccagccgccggtgctgttgacccaagggcgtggtccacggtacttgaagaagccagagcccacatcctgtgcactgctgaaggaccctacgctcggtggcctggcacctcactttgagaagagtgagcacactggctttgcatcctggaaggcctgcagggggcggggcaggaaatgtacctgaaaaggattttagaaaaccctgggaaacccaccacaccaccacaaaatggcctttagtgt

SEQ ID NO: 788 - DNA, 465 bp, homo sapiens
  misc_feature (218)..(218): n is a, c, g, or t
  misc_feature (265)..(265): n is a, c, g, or t
  misc_feature (272)..(273): n is a, c, g, or t
  misc_feature (275)..(280): n is a, c, g, or t
  misc_feature (283)..(283): n is a, c, g, or t
  misc_feature (285)..(286): n is a, c, g, or t
  misc_feature (298)..(298): n is a, c, g, or t
  misc_feature (300)..(300): n is a, c, g, or t
  misc_feature (302)..(302): n is a, c, g, or t
  misc_feature (308)..(338): n is a, c, g, or t
  misc_feature (347)..(347): n is a, c, g, or t
  misc_feature (364)..(364): n is a, c, g, or t
  misc_feature (377)..(377): n is a, c, g, or t
tgcacacagggcccttgggttgtgtgaactgaaattctccctgtatttgtgagactcgcaggagtccccatctgtagcacaggcaatgccagtgccatgctgcagcctcagaaaccaggcctctcactccagcagcaggcagaaccgtgtctgtggtcgggtgctgtccacagctctgtctgccttgttcttgggcttgagctggatagaggtggggntctcttcaccttccctgaattcagaacagaccctgtgcctggccccnagtgtgnncnnnnnnaantnnccccaggccctnantnggagcnnnnnnnnnnnnnnnnnnnnnnnnnnnnnnntcctcaccngcaggtgtcggggtggnggggggcaaggangggcaggcacacaccatgtctgacctgaacccgattctggggagcatcttcccgctccggccccacgacctccacagggttacattgt

SEQ ID NO: 789 - DNA, 501 bp, homo sapiens
gtgtccgaagttgagatggcctgccctactggcaaagaggtgacaggaaggctgggagcagctttgttaaattgtgttcagttctgttacacagtgcattgccctttgttgggggtatgcatgtatgaacacacatgcttgtcggaacgctttctcggcgtttgtcccttggctctcatctcccccattcctgtgcctactttgcctgagttcttctacccccgcagttgccagccagattgggagtctgtttgttccaatgggttgagctgtctttgtcgtggagatctggaactttgcacatgtcactactggggaggtgttcctgctctagcttccacgatgaggcgccctctttacctatcctctcaatcactactcttcttgaagcactattatttattcttccgctgtctgcctgcagcagtactactgtcaacatagtgtaaatggttctcaaaagcttaccagtgtggacttggtgttagccacgctgtttac

SEQ ID NO: 790 - DNA, 536 bp, homo sapiens
caaggtcatccctgagctgaacgggaagctcactggcatggccttccgtgtccccactgccaacgtgtcagtggtggacctgacctgccgtctagaaaaacctgccaaatatgatgacatcaagaaggtggtgaagcaggcgtcggagggccccctcaagggcatcctgggctacactgagcaccaggtggtctcctctgacttcaacagcgacacccactcctccacctttgacgctggggctggcattgccctcaacgaccactttgtcaagctcatttcctggtatgacaacgaatttggctacagcaacagggtggtggacctcatggcccacatggcctccaaggagtaagacccctggaccaccagccccagcaagagcacaagaggaagagagagaccctcactgctggggagtccctgccacactcagtcccccaccacactgaatctcccctcctcacagttgccatgtagaccccttgaagaggggaggggcctagggagccgcaccttgtcatgtaccatcaata

SEQ ID NO: 791 - DNA, 447 bp, homo sapiens
gatgcccttcctgacaatgaaaacaagaaacccactgcaatccccaagaaacccagtgctggggatgactttgacttaggagatgctgttgttgatggagaaaatgacgacccacgaccaccgaacccacccaaaccgatgccaaatccaaaccccaaccaccctagttcctccggtagcttttcagatgctgaccttgcggatggcgtttcaggtggagaaggaaaaggaggcagtgatggtggaggcagccacaggaaagaaggggaagaggccgacgccccaggcgtgatccccgggattgtgggggctgtcgtggtcgccgtggctggagccatctctagcttcattgcttaccagaaaaagaagctatgcttcaaagaaaatgatggctgaagacctagggaacaaggggaggtggacatggagagccaccggaatgccaac

SEQ ID NO: 792 - DNA, 529 bp, homo sapiens
  misc_feature (36)..(36): n is a, c, g, or t
gaaagtttgccatttagccctaattgagctgactgncctctatgatgtattgggtattgagctgaaacaacaaaaagctgtgaaaatcaaaacaaaagattctggtcttttttgcgttccattgacagcgctattagaacaagatcagaggaaagtaccaggaatgcgaatacccttgatctttcaaaaactgatttctcgaattgaagagagaggtttggaaacagaaggcctcttacggatccctggagctgccattagaatcaagaatctttgccaagaactagaagcaaagttttatgaagggacttttaattgggaaagtgtcaaacagcatgatgccgccagcctgctgaagctcttcattcgggagttgccccagccactgctcagtgtggagtatctcaaagcctttcaggctgtccagaatcttccaaccaagaagcagcaactacaggctttgaaccttcttgtcatcctcctacctgatgcaaacagggacacactgaaggcccttcttgaatttctc

SEQ ID NO: 793 - DNA, 544 bp, homo sapiens
aagttttatactctacatccacagtacgtcagcagttcttgaatgtttaaaaaaataaatgggtaaaatgcttctaaaaaatgcagatgtttataactacaatggtactaagatgggaaggagacaatgagagaagggataaaagcaaacatgttcatgtgcagggaatgtggttcaagtctttggatttaaaaacaagttccccagagaagctggcacttcctttgccctccaaaaaggacctgaaaagtcccaatccaaactttagaaaattagttatgagatgcaataaatgatgatcaaagcagtcagagggagaaggatgaatgtgtcttccatttagctagagactgtagcatagcctctttaggtgttggtggatcagtaaaaacgactgaagtaccagaagtgcttggaaggataggggtacaaagtaatgaccataataccttgtctaaatcagtagcagggcttcatggctaggaaacttttttaaacagtaaaatgtcattaggatagatcactctctcaccaacattaaatg

SEQ ID NO: 794 - DNA, 532 bp, homo sapiens
ttcggaaggcactctacgcttccaagatcatctcttacgctcaaggctttatgctgctaaggcaggcagccaccgagtttggctggactctcaattatggtggcatcgccctgatgtggagagggggctgcatcattagaagtgtattcctaggaaagataaaggatgcatttgatcgaaacccggaacttcagaacctcctactggacgacttctttaagtcagctgttgaaaactgccaggactcctggcggcgggcagtcagcactggggtccaggctggcattcccatgccctgttttaccactgccctctccttctatgacgggtacagacatgagatgcttccagccagcctcatccaggctcagcgggattacttcggggctcacacctatgaactcttggccaaaccagggcagtttatccacaccaactggacaggccatggtggcaccgtgtcatcctcgtcatacaatgcctgatgggctcctgtcaccctccacgtctccacagaccaggacattccatg

SEQ ID NO: 795 - DNA, 319 bp, homo sapiens
  misc_feature (55)..(55): n is a, c, g, or t
  misc_feature (61)..(61): n is a, c, g, or t
  misc_feature (65)..(65): n is a, c, g, or t
  misc_feature (74)..(74): n is a, c, g, or t
  misc_feature (83)..(83): n is a, c, g, or t
  misc_feature (89)..(89): n is a, c, g, or t
  misc_feature (92)..(92): n is a, c, g, or t
  misc_feature (182)..(182): n is a, c, g, or t
  misc_feature (211)..(211): n is a, c, g, or t
  misc_feature (224)..(224): n is a, c, g, or t
  misc_feature (226)..(226): n is a, c, g, or t
tttgtgctgatccgggatggcttcctgctcccaactggcctcagctccctggccnagctgnctgnctgctggangatcattgnagttcnggncggccggctggaagacaacgccagctgcccacaagtattactacagcgaagtctccgactaggcctccagatcagggcttcctcaccagnactggcctttcttctacccacctctaaangctggcagtggantntctgcctcacccaaagacttttcccttccagactttgagtgtcttcccttctagactttcccatctcctggtgagatgtttcccacttatgcc

SEQ ID NO: 796 - DNA, 423 bp, homo sapiens
gagcaacttgttcgtgggtcatcgggaatactagggagaaggtttcattgcccccagggcacttcacagagtgtgctggaggactgagtaagaaatgctgcccatgccaccgcttccggctcctgtgctttccctgaactgggacctttagtggtggccatttagccaccatctttgcaggttgctttgccctggtagggcagtaacattgggtcctgggtctttcatggggtgatgctgggctggctccctcttggtcttcccaggctggggctgaccttcctcgcagagaggccaggtgcaggttgggaatgaggcttgctgagaggggctgtccagttcccagaaggcatatcagtctctgagggcttcctttggggccgggaacttgcgggtttgaggataggagttcacttcatcttc

SEQ ID NO: 797 - DNA, 385 bp, homo sapiens
caagccctgctgtacaagaaaatcattaaggaacatttggagagttagctactagctgcctaagtgtgcactttcaatctaactgtgaaagaatcttctgatgtttgtattatccttcttatattatattaacaaaataaatcaagttgtggtatagtcaatctatttcttaataatactgcaaaaataatgctgacacatcacaatttcatattttaaaatttccagaattttaagcaaaaagcattatgaaggaaggcttggtttaataaagactgattttgttcagtgttatatgttagctgatacatatttgttcatttatgtgattgcagtactttatagctacatatttaccttgaatgttacaattagcttgccaata

SEQ ID NO: 798 - DNA, 442 bp, homo sapiens
gagaagaactttgtgcaccgtgacctggcggcccgcaacgtcctgctggttaaccggcactacgccaagatcagcgactttggcctctccaaagcactgggtgccgacgacagctactacactgcccgctcagcagggaagtggccgctcaagtggtacgcacccgaatgcatcaacttccgcaagttctccagccgcagcgatgtctggagctatggggtcaccatgtgggaggccttgtcctacggccagaagccctacaagaagatgaaagggccggaggtcatggccttcatcgagcagggcaagcggatggagtgcccaccagagtgtccacccgaactgtacgcactcatgagtgactgctggatctacaagtgggaggatcgccccgacttcctgaccgtggagcagcgcatgcgagcctgttactacagcctgg

SEQ ID NO: 799 - DNA, 189 bp, homo sapiens
ccctgactgaatcagcccagtgtccctgagcagcttagacagcagggctctctgtatcagtctttcttgagcagatgattcccctagttgagtagccagatgaaattcaagcctaaagacaattcattcatttgcatccatgggcacagaaggttgctatatagtatctaccttttgctacttatttaa

SEQ ID NO: 800 - DNA, 485 bp, homo sapiens
  misc_feature (26)..(26): n is a, c, g, or t
  misc_feature (42)..(42): n is a, c, g, or t
  misc_feature (48)..(48): n is a, c, g, or t
  misc_feature (59)..(59): n is a, c, g, or t
  misc_feature (282)..(355): n is a, c, g, or t
tacagcgccttgtgagcaggacggcnagcaagtacacagacngggccntgcgggccagntacacaccatccccagcacgctccacccacctcaagaccccggccagtgggctgcagacccccacaagcacaccggcgcctggctctgccacacgcacccctctcacacaggacccggcctccatcacggacaacctgctgcagctccctgcccggcgcaaagcttcggacttcttttagagccaggcctgggctgggctcatagacgcttcacagagcctgnnnnnnnnnnnnnnnnnnnnnnnnnnnnnnnnnnnnnnnnnnnnnnnnnnnnnnnnnnnnnnnnnnnnnnnnnnaccaggagtcactggagaaaggggctgtgctggggccagactggcacaaggcactcgtgcccacaccacaccccagggccttgccaagctgtttgctgtttaattggccccttgaactgtcattaaagaa

SEQ ID NO: 801 - DNA, 461 bp, homo sapiens
gccaagtggaccacagctgtgcggcctctcaggctacctagcagcaaggcccaggtgaagccagggcagctgtgcagtgtggctggctggggttatgtctcaatgagcactttagcaaccacactgcaggaagtgttgctgacagtgcagaaggactgccagtgtgaacgtctcttccatggcaattacagcagagccactgagatttgtgtgggggatccaaagaagacacagaccggtttcaagggggactccggggggcccctcgtgtgtaaggacgtagcccaaggtattctctcctatggaaataaaaaagggacacctccaggagtctacatcaaggtctcacacttcctgccctggataaagagaacaatgaagcgcctctaacagcaggcatgagactaaccttcctctgggcctgaccatctctgggacagaggcaagaatccccaagggtg

SEQ ID NO: 802 - DNA, 568 bp, homo sapiens
aagtggaggcactcttcagttatgaggctacccaaccagaggacctggagtttcaggaaggggatataatcctggtgttatcaaaggtgaatgaagaatggctggaaggggagtgcaaagggaaggtgggcattttccccaaagtttttgttgaagactgcgcaactacagatttggaaagcactcggagagaagtctaggatgtttcacaaactacaaagctgaagaaaatgaagccctattacttgtttgtaagatttagcacccttctgctgtatactgtactgagacattacagtttggaagtgttaactatttattccctgttaaaatttaacctactagacaatgatgtgagtacccaggatgatttcctggggcacagtgggtgaggagatggggacaggtgaatggaggagttaggggagaggaaaagtggatggaagtgtctggaaagggcacgagagagtcttccaggtactgatcctgtttcttgctctgagtgctagctagccagctgtgttcacactgtaaacattcatcaagctgtacatttggtgcacttttc

SEQ ID NO: 803 - DNA, 443 bp, homo sapiens
  misc_feature (192)..(193): n is a, c, g, or t
agaggacccacaatgacatcatccacaacgagaacatgaggcaaggccgggacaagtacaagacgctgcggcagatccggcagggcaacaccaagcagcgcatcgacgagttcgaggccctgtaacagccaggccaggaccaagggcagaggggtgctcatagcgggcgctgccagccccgccacgcttgtnnctttagtgctccaagtctaggaactccctcagatcccagttcctttagaaagcagttacccaacagaaacattctgggctgggaaccagggaggcgccctggtttgttttccccagttgtaatagtgccaagcaggcctgattctcgcgattattctcgaatcacctcctgtgttgtgctgggagcaggactgattgaattacggaaaatgcctgtaaagtctgagtaagaaacttcatgctggcctgtg

SEQ ID NO: 804 - DNA, 360 bp, homo sapiens
  misc_feature (35)..(35): n is a, c, g, or t
  misc_feature (90)..(90): n is a, c, g, or t
  misc_feature (95)..(95): n is a, c, g, or t
  misc_feature (167)..(167): n is a, c, g, or t
  misc_feature (192)..(192): n is a, c, g, or t
  misc_feature (211)..(211): n is a, c, g, or t
  misc_feature (247)..(247): n is a, c, g, or t
  misc_feature (268)..(268): n is a, c, g, or t
caatctgtgcttaactaaaccccactgtcttccanggtcaggttggccatccgcaggcgtagttgctaggaaggtttgacagatgtccgncctgntgattcagacgttcccaggatttggagcaagaagagcaaggaaggccaggcgcggtggctcacgtttgtaantcccagcactttgggaggccgaggncgggcggatcacgaggtcnaggagttcgagaccagcctggccagcatggtgaaancccgtctctactaaaaatacnaaagaaaattagccgggtgtggtggcacatgcctgtagtcccacctacttgggaggctgaggcaggagaattgtttgacctggcaggcggag

SEQ ID NO: 805 - DNA, 501 bp, homo sapiens
ggaccttccagatcctggtgatgctggaaatgactccccagcgtggagacgtctacacctgccacgtggagcaccccagcctccagaaccccatcatcgtggagtggcgggctcagtctgaatctgcccagagcaagatgctgagtggcattggaggcttcgtgctggggctgatcttcctcgggctgggccttattatccatcacaggagtcagaaagggctcctgcactgactcctgagactattttaactgggattggttatcacttttctgtaacgcctgcttgtccctgcccagaattcccagctgcctgtgtcagcctgtccccctgagatcagagtcctacagtggctgtcacgcagccaccaggtcatctcctttcatccccacctcgaggctgatggctgtgaccctgcttcctgcacttacccagagcctctgcctgtgcacggccagctgcgtctactgaggccccaaggggtttctgtttctattctct

SEQ ID NO: 806 - DNA, 491 bp, homo sapiens
caggcaggagtttctctcggtgactactatcgctgtcatgtctggtcgtggcaagcaaggaggcaaggcccgcgccaaggccaagtcgcgctcgtcccgcgctggccttcagttcccggtagggcgagtgcatcgcttgctgcgcaaaggcaactacgcggagcgagtgggggccggcgcgcccgtctacatggctgcggtcctcgagtatctgaccgccgagatcctggagctggcgggcaacgcggctcgggacaacaagaagacgcgcatcatccctcgtcacctccagctggccatccgcaacgacgaggaactgaacaagctgctgggcaaagtcaccatcgcccagggcggcgtcttgcctaacatccaggccgtactgctccctaagaagacggagagtcaccacaaggcaaagggcaagtgaggctgacgtccggcccaagtgggcccagcccggcccgcgtctcgaaggggcacctgtgaac

SEQ ID NO: 807 - DNA, 503 bp, homo sapiens
gtggctatccactgttagttcagaagctgggcttggactactcttatgatttagctccacgagccaaaattttccggcgtgaccaagggaaagtgactgatacggcatccatgaaatatatcatgcgatacaacaattataagaaggatccttacagtagaggtgacccctgtaataccatctgctgccgtgaggacctgaactcacctaacccaagtcctggaggttgttatgacacaaaggtggcagatatctacctagcatctcagtacacatcctatgccataagtggtcccacagtacaaggtggcctccctgtttttcgctgggaccgtttcaacaaaactctacatcagggcatgccagaggtctacaactttgattttattaccatgaaaccaattttgaaacttgatataaaatgaaggagggagatgacggactagaagactgtaaataagataccaaaggcactattttagctatgtttttcccatcagaat

SEQ ID NO: 808 - DNA, 209 bp, homo sapiens
  misc_feature (124)..(124): n is a, c, g, or t
  misc_feature (126)..(127): n is a, c, g, or t
  misc_feature (129)..(131): n is a, c, g, or t
  misc_feature (133)..(141): n is a, c, g, or t
  misc_feature (143)..(148): n is a, c, g, or t
  misc_feature (153)..(153): n is a, c, g, or t
  misc_feature (156)..(156): n is a, c, g, or t
  misc_feature (166)..(166): n is a, c, g, or t
tcagcttttaacctctggaccagctacattgcctgatcagttgatggccataagtcagccaggccaaccacaaaacgagggccagccacctgtgacaacacttctttctcagcaaatgccagananntnnncnnnnnnnnncnnnnnnaacancanccagaacatngaaaagattgatttgcttgtttcattgcaaaaccaagggaaca

SEQ ID NO: 809 - DNA, 323 bp, homo sapiens
tcgactctgctgctcatgggaagaacagaattgctcctgcatgcaactaattcaataaaactgtcttgtgagctgatcgcttggagggtcctctttttatgttgagttgctgcttcccggcatgccttcattttgctatggggggcaggcaggggggatggaaaataagtagaaacaaaaaagcagtggctaagatggtatagggactgtcataccagtgaagaataaaagggtgaagaataaaagggatatgatgacaaggttgatccacttcaagaattgcttgctttcaggaagagagatgtgtttcaacaagccaacta

SEQ ID NO: 810 - DNA, 540 bp, homo sapiens
aagctaggtcgtgggtcagctctgaggatgtatacccctggtgggagagggagacctagagatctggctgtggggcgggcatggggggtgaagggccactgggaccctcagccttgtttgtactgtatgccttcagcattgcctaggaacacgaagcacgatcagtccatccagagggaccggagttatgacaagcttcccaaatattttgctttatcagccgatatcaacacttgtatctggcctctgtgcccagcagtgccttgtgcaatgtgaatgtaccgtctctgctaaaccaccattttatttggttttgttttgtttggttttctcggatacttgccaaaatgagactctccgtcggcagctgggggaagggtctgagactctctttccttttggttttgggattacttttgatcctgggggaccaatgaggtgaggggggttctcctttgccctcagctttcccagccctccggcctgggctgcccacaaggcttctcccccagaggccctggctcctggtcgggaagggag

SEQ ID NO: 811 - DNA, 544 bp, homo sapiens
  misc_feature (252)..(252): n is a, c, g, or t
gcaaaagcaagcctccaaaagccccttggttcttctctgtgtgtctcgccccttctgccttgtacaccagactgccggcaagcaagcggggaggtggcgaacagctgggatcctccagtgaaaagtttgctcagcgcgagagatgtcaagaggctgggattgtcgcctatcgggaggtggggagctctctcactcacacttcctgggaaatgaaggagaactaataggcagcccgcatttgcagccagccancctgggtggtattccttgaagtgaagcgctcataaatcccttctggggccagagccggtttcacaagctgcaggatttgggtggcctgcctgctctttgggagcgggcttgggaagctgaagaaattgaatcaggacctcaggccctttacagactcccttctacacttggttgctgattaagaacattatgtggcatttaaaatggcacaattatcttccgttggccgttcctagctaaaagtagactcctatcagcccgtgactgacgacaagaaggctcttcgtccctg

SEQ ID NO: 812 - DNA, 264 bp, homo sapiens
ccctcattgggagcccttggtgttctgagcagcagggcccaggcagcacatgagcagtgcccaggggctccctgcgtgaggacggcaaggtgcgatgtatgtctaacttattgatggcaggcagccccctgtgccccctaagcctggccctggttattgctgagctctgtgctcagtgctgcggcctggccgtggctcgtctgttcctttggggggcccgggcgggttgtgggaatcagtcttcacagacagacgtgagccagg

SEQ ID NO: 813 - DNA, 414 bp, homo sapiens
acagcacccgtagttactgtgacccacagaaattattatgaacggatacatgccttaggtccgaactacaatctggtcattagcgatctgaggatggaagacgcaggagactacaaagcagacataaatacacaggctgatccctacaccaccaccaagcgctacaacctgcaaatctatcgtcggcttgggaaaccaaaaattacacagagtttaatggcatctgtgaacagcacctgtaatgtcacactgacatgctctgtagagaaagaagaaaagaatgtgacatacaattggagtcccctgggagaagagggtaatgtccttcaaatcttccagactcctgaggaccaagagctgacttacacgtgtacagcccagaaccctgtcagcaacaattctgactccatctct

SEQ ID NO: 814 - DNA, 509 bp, homo sapiens
gacaatcgtcatgcaatttatcctggagctggccaagagcctaaaggtggacccccgggcctgcttccggcagttcttcactaagattaagacagccgatcgccagtacatggagggcttcaacgacgagctggaagccttcaaggagcgtgtgcggggccgtgccaagctgcgcatcgagaaggccatgaaggagtacgaggaggaggagcgcaagaagcggctcggccccggcggcctggaccccgtcgaggtctacgagtccctccctgaggaactccagaagtgcttcgatgtgaaggacgtgcagatgctgcaggacgccatcagcaagatggaccccaccgacgcaaagtaccacatgcagcgctgcattgactctggcctctgggtccccaactctaaggccagcgaggccaaggagggagaggaggcaggtcctggggacccattactggaagctgttcccaagacgggcgatgagaaggatgtcagtgtgtgacctgccc

SEQ ID NO: 815 - DNA, 339 bp, homo sapiens
gaaggaggagcctcagacagtgcccgagatgcccggcgagacaccgcccctgtcccccatcgacatggagtcccaggagcggatcaaggcggagaggaagcgcatgaggaaccgcatcgctgcctccaagtgccgaaaaaggaagctggagagaatcgcccggctggaggaaaaagtgaaaaccttgaaagctcagaactcggagctggcgtccacggccaacatgctcagggaacaggtggcacagcttaaacagaaagtcatgaaccacgttaacagtgggtgccaactcatgctaacgcagcagttgcaaacattttgaagagagaccgtcggggg

SEQ ID NO: 816 - DNA, 470 bp, homo sapiens
acctcgcccggaaggagctgaagagaatgcaggacctggacgaggatgccaccctcacccagctcgccactgcctgggtcagcctggccacgggtggtgagaagctgcaggatgcctactacatcttccaggagatggctgacaagtgctcgcccaccctgctgctgctcaatgggcaggcggcctgccacatggcccagggccgctgggaggccgctgagggcctgctgcaggaggcgctagacaaggatagtggctacccagagacgctggtcaacctcatcgtcctgtcccagcacctgggcaagccccctgaggtgacaaaccgatacctgtcccagctgaaggatgcccacaggtcccatcccttcatcaaggagtaccaggccaaggagaacgactttgacaggctggtgctacagtacgctcccagcgcctgaggctggcccagagctgtcaggaccatgaag

SEQ ID NO: 817 - DNA, 538 bp, homo sapiens
attccatcttggcagaaaccacagcattggtttttttctacttgtgtgtctgggggaatgaacgcacagatctgtttgactttgttataaaaatagggctcccccacctcccccatttctgtgtcctttattgtagcattgctgtctgcaagggagcccctagcccctggcagacatagctgcttcagtgccccttttctctctgctagatggatgttgatgcactggaggtcttttagcctgcccttgcatggcgcctgctggaggaggagagagctctgctggcatgagccacagtttcttgactggaggccatcaaccctcttggttgaggccttgttctgagccctgacatgtgcttgggcactggtgggcctgggcttctgaggtggcctcctgccctgatcagggaccctccccgctttcctgggcctctcagttgaaccaaagcagcaaaacaaaggcagttttatatgaaagattagaagcctggaataatcaggctttttaaatgatgtaattcccactgtaatagcat

SEQ ID NO: 818 - DNA, 496 bp, homo sapiens
gtgatggggtcactacctgatgtccggcaggcctgtcttcaaatggccatctcatggcatctgagtcgccgccagccagacatggtgcctctggggcaccacaaagaaaaatatttctcaggccccaagcccaaagctgtgctaaaccaattccgaacagatttggaaaagctggaaaaggagattacagcccggaatgagcaacttgactggccctatgaatatctgaagcccagctgcatagagaacagtgtcaccatctgagccctagagtgactctacctgcaagatttcacatcagctttaggactgacatttctatcttgaatttcatgctttcctaaagtctctgctgctaaggctctatttcctcccccagttaaaccccctacattagtatcccactagcccaggggagcagtaaactttctctgcaaagactagatccttttttacgctttgcagaccgcatagtcactgtctcaactactcagct

SEQ ID NO: 819 - DNA, 505 bp, homo sapiens
tctggagaccttgctggcagtgctagccaggaaacagagtgaccaagggacaagaagggacttgcctaaagccacccagcaactcagcagcagaaccaagatgggccccaggctcctccatatggcccagggcttaccaccctatcacacgtggccttgtctagacccagtcctgagcaggggagaggctcttgagacctgatgccctcctacccacatggttctcccactgccctgtctgctctgctgctacagaggggcagggcctcccccagcccacgcttaggaatgcttgcctctggcaggcaggcagctgtacccaagctggtgggcagggggctggaaggcaccaggcctcaggaggagccccatagtcccgcctgcagcctgtaaccatcggctgggccctgcaaggcccacactcacgccctgtgggtgatggtcacggtgggtgggtgggggctgaccccagcttccaggggactgtcactgtggacgccaaaat

SEQ ID NO: 820 - DNA, 237 bp, homo sapiens
ggagcattttgtgaagaaggtggaggcagcccattgtgcagcctgcgacctcttcattcccatgcagtttgggatcatccagaagcatctgaagaccatggatcacaaccggaaccgcaggctcatgatggagcagtccaagaagtcctccctcatggtggcccgcagtattctcaacaacaagctcatcagcaagaagctggagcgctacctgaagggcgagaaccctttcaccga

SEQ ID NO: 821 - DNA, 454 bp, homo sapiens
gtcgtctttctattttcaggtcagctgattagccaccttagttccatctgcaactttagttcccactggctgtgtaacctaacatagtcacaggctctggggactgtcacgtggacatctttgggaggccgttattctgcccaccgcaccctccgttcatcccctgccctgccgggcacctcgctctaccccaggaaaatgtgagctcgttttcctgctcggcatgtgctccccctaaggctctgctcctccctgggcctgaaagttccttctcagcctgagagggggcccttcgatctcaggcatgactcagcccggctgatgcctctgcagtgctgagtcaggatttggggccggctctcttgggtctgtccccttttcccaggtactgccttacaaagctgtggccaggaagtggccggtataaaggatgcccaaggtctttgtacgtgtg

SEQ ID NO: 822 - DNA, 489 bp, homo sapiens
gggatgcatttgtggccattgttcaaagtgtcaagaacaagcctctcttctttgccgacaaactttacaaatccatgaagggtgctggcacagatgagaagactctgaccaggatcatggtatcccgcagtgagattgacctgctcaacatccggagggaattcattgagaaatatgacaagtctctccaccaagccattgagggtgacacctccggagacttcctgaaggccttgctggctctctgtggtggtgaggactagggccacagctttggcgggcacttctgccaagaaatggttatcagcaccagccgccatggccaagcctgattgttccagctccagagactaaggaaggggcaggggtggggggaggggttgggttgggctcttatcttcatggagcttaggaaacgctcccactcccacgggccatcgagggccagcacggctgagcggtgaaaaaccgtagccatagatcctgtcc

SEQ ID NO: 823 - DNA, 128 bp, homo sapiens
cccgtgcccacatcaaggagtatttctacaccagtggcaagtgctccaacccagcagtcgtctttgtcacccgaaagaaccgccaagtgtgtgccaacccagagaagaaatgggttcgggagtacatc

SEQ ID NO: 824 - DNA, 414 bp, homo sapiens
ccccaggagaagagtcactcagacagcagtatgagcaagccagccagcagctccgtgcctgcacccagctcaggggaatcccagggggttcagatgcccaggaaggaaaaggggacagcgctactgctatggaatgagaccaccacttctcctgttgtccttcccagcttctccccaacctccccttttccctagtttataagacaggagaaaagggagaaagcaaaaagctggaaagaaacagaagtaagataaatagctagacgaccttggcgccaccacctggccctggtggttaaaatgataataatattaacccctgaccaaaacgactggtgttatctgtaaatcccagacattgtgtgagaaagcaccgtaaaactttttgtcctattagctgatgtgtgtagcccc

SEQ ID NO: 825 - DNA, 382 bp, homo sapiens
gatagcaaacactgggggcaccttaagattttgcacctgtaaagtgccttacagggtaactgtgctgaatgctttagatgaggaaatgatccccaagtggtgaatgacacgcctaaggtcacagctagtttgagccagttagactagtcccccggtctcccgattcccaactgagtgttatttgcacactgcactgttttcaaataacgattttatgaaatgacctctgtcctccctctgatttttcatattttcctaaagtttcgtttctgttttttaataaaaagctttttcctcctggaacagaagacagctgctgggtcaggccacccctaggaactcagtcctgtactctggggtgctgcctgaatccattaaaaat

SEQ ID NO: 826 - DNA, 500 bp, homo sapiens
ggcatttttccgtaagcattgagtgtagccaaaagttccttcgtgtattgctctcccatctccgcagcccggttttgaccggatggtgcttctaattttctgctaacctgtactgtggtgtgtgtatatttcttgccaacacgccagaaataaaactaaggttgtactgaagttggaaaaattcaggttaatgtagctcatgctggctaaagtgaaacgttctctccccgccccccgttcctaagcagtgttaagttttctttgaattttttcaagccggattttgggcctgcttaaaccacttaaatgtagttaatgacagatggtttgaggtttaaaagtcttctggagaaagcccgccagagaacattccctttgaagccccatgtaaaaatacgtgtgggagagaaagtgttttctctgacttctgctgacagtggctaaaactctgaactgtcaggagtattcaaaataagactgccttgtaggtaagcctgtgg

SEQ ID NO: 827 - DNA, 566 bp, homo sapiens
taaactgacaccccagatgttccagcagctgatgaagcaagtgacgcagctggccatcgacaccgaggaacgcctcaaaggggtcattgacctcatttttgagaaggccatttcagagcccaacttctctgtggcctatgccaacatgtgccgctgcctcatggcgctgaaagtgcccactacggaaaagccaacagtgactgtgaacttccgaaagctgttgttgaatcgatgtcagaaggagtttgagaaagacaaagatgatgatgaggtttttgagaagaagcaaaaagagatggatgaagctgctacggcagaggaacgaggacgcctgaaggaagagctggaagaggctcgggacatagcccggcggcgctctttagggaatatcaagtttattggagagttgttcaaactgaagatgttaacagaggcaataatgcatgactgtgtggtcaaactgcttaagaaccatgatgaagagtcccttgagtgcctttgtcgtctgctcaccaccattggcaaagacctggactttgaaaaagccaagccccgaatggatcagt

SEQ ID NO: 828 - DNA, 541 bp, homo sapiens
ctagtggattttctcaagaccccttcaggcatcaagttgaccatcaacaaactcctggacatggcagcccaaattgcagaaggcatggtattcattgaagagcggaattatattcatcgtgaccttcgggctgccaacattctggtgtctgacaccctgagctgcaagattgcagactttggcctagcacgcctcattgaggacaacgagtacacagccagggagggggccaagtttcccattaagtggacagcgccagaagccattaactacgggacattcaccatcaagtcagatgtgtggtcttttgggatcctgctgacggaaattgtcacccacggccgcatcccttacccagggatgaccaacctggaggtgattcagaacctggagcgaggctaccgcatggtgcgccctgacaactgtccagaggagctgtaccaactcatgaggctgtgctggaaggagcgcccagaggaccggcccacctttgactacctgcgcagtgtgctggaggacttcttcacggccacagagggcc

SEQ ID NO: 829 - DNA, 114 bp, homo sapiens
caggctaaactgctcttttcagatggagaaaaagtaatacccagattgacccatgagcttccaggaataaagcgtggccgtcaggcagaagaagaatgtgcccatcgaggaagc

SEQ ID NO: 830 - DNA, 479 bp, homo sapiens
acataagcgaccgctttacctccgaaggatcgtggggtctgccacaaggtacctccaggtcctgtgtatgtcagttgctgcagaaatggatttggaagatggaggagagatgcccaagcaacgggatcccaagtctaactaaacaccatctggaatcctgatgtggaaagcaggggtttctggtctactggctagagctaaggaagttgaaaaggaaagctcacttctttggaggcacctgtccagaagcctggcctaggcagcttcaacctttgaacttactttttgaaatgaaaagtaatttatttgttttgctacatactgttccagacttttaaaggggacaatgaaggtgactgtggggaggagcatgtcaggtttgggcttggttgttttagaagcacctgggtgtgcctacctactcctcttttcttttaaaagggcccacaatgctccaatttcctgtctcctttagagag

SEQ ID NO: 831 - DNA, 149 bp, homo sapiens
  misc_feature (55)..(55): n is a, c, g, or t
atattttgtatcatcgtgcctatagccgctgccaccgtgtataaatcctggtgtntgctccttatcctggacatgaatgtattgtacactgacgcgtccccactcctgtacagctgctttgtttctttgcaatgcattgtatggcttta

SEQ ID NO: 832 - DNA, 472 bp, homo sapiens
gagtgccaaacttaagttatttgctttcggaggtaccagtgtcagtcatgacaagctccccaaagttcagtgttacgatcagtgtgaaaacaggtggactgtaccggccacctgtccccagccctggcgtatacacagccaagcaagctgtcctgggggaacccaggattttttattatggggggtgatacagaatttctctgcctgcttctgcttataaattcgcaacagtgagacttaccagtggaccaaaggtgggagatgtgacagcaaagcgcatgagctgccatgctgttggcctctggaaacaaactcttacgtggttggaggatactttgggcattcagcgatgcaagactttggactgctacgatccaacattagacgtgtggaacagcatcaccactgtcccgtactcgctgattcctactgcattttgtcagcacctggaaacatctgccttcttaaatgc

SEQ ID NO: 833 - DNA, 534 bp, homo sapiens
gctacgtgctgagtggggctgggaatttcatggacccctcaaagcggcaccagcgcaaggtccccaacggctatctgcgcttccactatgggactgaagactcactgggtggctttgcctatgtggagatcagctccaaagagatgactgtcacttacatcgaggcctcgggcaagtccctctttaagaccaggctgccgaggcgagccaggccctgaactcccatgactgcccagctctgaggcccgatctccactgttgggtgggtggcctgccgggaccctgctcacaggcaggcttttcctccaacctgtggcgctgcagcagggcaggaaggggaaacacagctgatgaactgtggtgccacatgacccttgtggcacagatgcccacgtatgtgaaacacacatggacatgtgtcccagccacagtgttatgctctgtggctggctcacctttgctgagttccggggtgcaatgggggagggagggagggaaagcttcctcctaaatcaagcatctttctgttactga

SEQ ID NO: 834 - DNA, 364 bp, homo sapiens
gccaaaatgatacctggaggcttatctgaggccaaacccgccactccagaaatccaggagattgttgataaggttaaaccacagcttgaagaaaaaacaaatgagacttatggaaaattggaagctgtgcagtataaaactcaagttgttgctggaacaaattactacattaaggtacgagcaggtgataataaatatatgcacttgaaagtattcaaaagtcttcccggacaaaatgaggacttggtacttactggataccaggttgacaaaaacaaggatgacgagctgacgggcttttagcagcatgtacccaaagtgttctgattccttcaactggctactgagtcatgatccttgctga

SEQ ID NO: 835 - DNA, 522 bp, homo sapiens
tcagaaggtaggggccgtgtcccgcggtgctgactgaggcctgcttccccctccccctcctgctgtgctggaattccacagggaccagggccaccgcaggggactgtctcagaagacttgatttttccgtccctttttctccacactccactgacaaacgtccccagcggtttccacttgtgggcttcaggtgttttcaagcacaacccaccacaacaagcaagtgcattttcagtcgttgtgcttttttgttttgtgctaacgtcttactaatttaaagatgctgtcggcaccatgtttatttatttccagtggtcatgctcagccttgctgctctgcgtggcgcaggtgccatgcctgctccctgtctgtgtcccagccacgcagggccatccactgtgacgtcggccgaccaggctggacaccctctgccgagtaatgacgtgtgtggctgggaccttctttattctgtgttaatggctaacctgttacactgggctgggttgggtagggtgttctggc

SEQ ID NO: 836 - DNA, 416 bp, homo sapiens
gttggttcaaacttttgggagcacggactgtcagttctctgggaagtggtcagcgcatcctgcagggcttctcctcctctgtcttttggagaaccagggctcttctcaggggctctagggactgccaggctgtttcagccaggaaggccaaaatcaagagtgagatgtagaaagttgtaaaatagaaaaagtggagttggtgaatcggttgttctttcctcacatttggatgattgtcataaggtttttagcatgttcctccttttcttcaccctcccctttgttcttctattaatcaagagaaacttcaaagttaatgggatggtcggatctcacaggctgagaactcgttcacctccaagcatttcatgaaaaagctgcttcttattaatcatacaaactctcaccatgatgtg

SEQ ID NO: 837 - DNA, 500 bp, homo sapiens
cactcttataccaagggcaagcggctgccccgtgcacttcagcaaaatggagctccaggtattgccaaggtcaaggccaactgagaagcatggcctagataggcgcccacctaagtgcctcaggactgcaccttagggcagtgtccgtcagtgccctctccacctacacctgtgaccaaggcttatgtggtcaggactgagcaggggactggccctcccctccccacagctgctctacagggaccacggctttggttcctcacccacttcccccgggcagctccagggatgtggcctcattgctgtctgccactccagagctgggggctaaaagggctgtacagttatttccccctccctgccttaaaacttgggagaggagcactcagggctggccccacaaagggtctcgtggcctttttcctcacacagaagaggtcagcaataatgtcactgtggacccagtctcactcctccaccccacacactgaagcagtagc

SEQ ID NO: 838 - DNA, 398 bp, homo sapiens
gtgtacataaatttgacctgctcatctatacacggttacccagaacctaagaagatgagtgttttgctaagaaccaagaattcaactatcgagtatgatggtattatgcagaaatctcaagataatgtcacagaactgtacgacgtttccatcagcttgtctgtttcattccctgatgttacgagcaatatgaccatcttctgtattctggaaactgacaagacgcggcttttatcttcacctttctctatagagcttgaggaccctcagcctcccccagaccacattccttggattacagctgtacttccaacagttattatatgtgtgatggttttctgtctaattctatggaaatggaagaagaagaagcggcctcgcaactcttataaatgtgg

SEQ ID NO: 839 - DNA, 457 bp, homo sapiens
  misc_feature (41)..(42): n is a, c, g, or t
  misc_feature (61)..(61): n is a, c, g, or t
  misc_feature (66)..(66): n is a, c, g, or t
  misc_feature (71)..(71): n is a, c, g, or t
  misc_feature (79)..(80): n is a, c, g, or t
  misc_feature (82)..(82): n is a, c, g, or t
  misc_feature (122)..(122): n is a, c, g, or t
  misc_feature (131)..(131): n is a, c, g, or t
  misc_feature (137)..(138): n is a, c, g, or t
  misc_feature (153)..(153): n is a, c, g, or t
  misc_feature (314)..(314): n is a, c, g, or t
ccctccgggaaactgtggcgtgatggccgcggggctctccnngaacatcatccctgcctcntactnggcgnctgccaanngntgtgggcaaggtcatccctgagctgaacgggaagctcacntggcatggnccttcnngtgtccccactgccnacgtgtcagtggtggacctgacctgccgtctagaaaaacctgccaaatatgatgacatcaagaaggtggtgaagcaggcgtcggagggccccctcaagggcatcctgggctacactgagcaccaggtggtctcctctgacttcaacagcgacacccactcnctccacctttgacgctggggctggcattgccctcaacgaccactttgtcaagctcatttcctggtatgacaacgaatttggctacagcaacagggtggtggacctcatggcccacatggcctccaaggagtaagacccctgga

SEQ ID NO: 840 - DNA, 321 bp, homo sapiens
acttcttttcttatcatcagttcatccatctattatgccgagttgcaatcaactgtgaaaaatttactgaaacattagttaagctgagtgtcctagttgcctatgaaggtttgccacttcatcttgcactgttccccaaactttggactgagctatgccagactcagtctgctatgtcaaaaaactgcatcaagcttttgtgtgaagatcctgttttcgcagaatatattaaatgtatcctaatggatgaaagaacttttttaaacaacaacattgtctacacgttcatgacacatttccttctaaaggttcaaagtcaag

SEQ ID NO: 841 - DNA, 478 bp, homo sapiens
gcaaaatgtcgcagctggaacgcaacatagagaccatcatcaacaccttccaccaatactctgtgaagctggggcacccagacaccctgaaccagggggaattcaaagagctggtgcgaaaagatctgcaaaattttctcaagaaggagaataagaatgaaaaggtcatagaacacatcatggaggacctggacacaaatgcagacaagcagctgagcttcgaggagttcatcatgctgatggcgaggctaacctgggcctcccacgagaagatgcacgagggtgacgagggccctggccaccaccataagccaggcctcggggagggcaccccctaagaccacagtggccaagatcacagtggccacggccatggccacagtcatggtggccacggccacaggccactaatcaggaggccaggccaccctgcctctacccaaccagggccccggggcctgttatgtcaaactgtctt

SEQ ID NO: 842 - DNA, 545 bp, homo sapiens
  misc_feature (210)..(210): n is a, c, g, or t
ggctttctgaactttgcgcgttaagccgggacagctgctttgctgcccggagagtagtccgcgccaggaagagagcaacgaggaaaggagagggactctggcgtcccggcaggcgagaggcgaggctgagcgaaagaaggaaggaccagacggaccctgtctgtcagagttcggagaaacactggctcctcagccctgagacacaggccntcagttagggacgctcggcgcccaaatctcatcagttttattgcctgctcgattatatagaaaaatacaaaaaatctgcattaaaaatattaatcctgcatgctggacatgtatggtaataatttctattttgtaccattttcttgtttaactttagcatgttgttgatcatggatcatactccccttgtttctttgggtgagaagggatcgcagtttggaaactccggcggctgcgtgcggggtttcagtcccagctgtaggcttgtaaatacccgccccgccaaaccgcatagagaacgtggcagcaagctgagggtctttgtttgggtttat

SEQ ID NO: 843 - DNA, 122 bp, homo sapiens
ccaagcaggctgccacgcagagtgagctgcactacgcaaatctggagctgctgatgtggcctctgcaggaaaagccagcaccaccaagggaggtggaggtggaatacagcactgtggcctcc

SEQ ID NO: 844 - DNA, 362 bp, homo sapiens
  misc_feature (128)..(128): n is a, c, g, or t
gtgctgcaaagttgtgtgcatcgctaaagagagccccaacctatacagagagcaaacaatgagataagaggaactgtcgcaaagctttccactgaaacacaggtcaccctggaagtttgcagggtttnctgtgggcatctgtagatttctcgatctcgttagattgcaggcatcttgacatcttggcaactgcctagttaatgccagtggcctgtaccatattatggaaaactgttaactgcttaattgggtaattttcaaagaaagtaatgttgttaaatggggcgaaataagaagttaaatttgaaagtgaatgtgttcaaatgaaaggtttgataattgcatctgttactacttagttt

SEQ ID NO: 845 - DNA, 552 bp, homo sapiens
atgtcatccgtatttcaaccggagtaaattgctagatttctgcaagtcgaaagatattgttctggttgcctatagtgctctgggatctcaacgagacaaacgatgggtggacccgaactccccggtgctcttggaggacccagtcctttgtgccttggcaaaaaagcacaagcgaaccccagccctgattgccctgcgctaccagctgcagcgtggggttgtggtcctggccaagagctacaatgagcagcgcatcagacagaacgtgcaggtttttgagttccagttgactgcagaggacatgaaagccatagatggcctagacagaaatctccactattttaacagtgatagttttgctagccaccctaattatccatattcagatgaatattaacatggagggctttgcctgatgtctaccagaagccctgtgtgtggatggtgacgcagaggacgtctctatgccggtgactggacatatcacctctacttaaatccgtcctgtttagcgacttcagtcaactacagctgagtccataggccagaaag

SEQ ID NO: 846 - DNA, 362 bp, homo sapiens
tagctccacattcctgtgcattgaggggttaacattaggctgggaagatgacaaaacttgaagagcatctggagggaattgtcaatatcttccaccaatactcagttcggaaggggcattttgacaccctctctaagggtgagctgaagcagctgcttacaaaggagcttgcaaacaccatcaagaatatcaaagataaagctgtcattgatgaaatattccaaggcctggatgctaatcaagatgaacaggtcgactttcaagaattcatatccctggtagccattgcgctgaaggctgcccattaccacacccacaaagagtaggtagctctctgaaggctttttacccagcaatgtcct

SEQ ID NO: 847 - DNA, 519 bp, homo sapiens
acagctcccgacgtgagaatatcctggagacggggccacttccacgggcagtccttctacagcacaaggccgccttccattcacaaggaatatgtgaaccggctctttctgaactggacagagggtcagaagagcggcttcctcaggatctccaacctgcagaagcaggaccagtctgtgtatttctgccgagttgagctggacacacggagctcagggaggcagcagtggcagtccatcgaggggaccaaactctccatcacccaggggaacccttccaaaacacagaggagccatatgagaatatcaggaatgagggacaaaatacagatcccaagctaaatcccaaggatgacggcatcgtctatgcttcccttgccctctccagctccacctcacccagagcacctccagccaccgtcccctcaagagcccccagaacgagaccctgtactctgtcttaaaggcctaaccaatggacagccctctcaagactgaatggtgaggccaggtacagtg

SEQ ID NO: 848 - DNA, 523 bp, homo sapiens
acagagcttcctgtacacagttgcatgtactgcattatgcaaatgcattatattttatgtaacctgtccactgttggtaggcacttgagttgttttagtcttttgctatcaaacagttctgggatgattaaccctgatttactgcaaaattgaaattgctctgctattctgctggaatggtggtaagtgaactgaaaattccagtcactcttgggctagactcaacgttcttaaaaactatgtggccatcaccaaattagttattttgaaccttaatttcttcacctctaaaatggaggtaatacttaccttaagtggctatgagaatgaagatcatgtgtatgaattgttggtgctctaaagaacagcacaaataaaattattttcaaatttaattttaattgaactatgtgtaatttcttaattttgaaataattttatttgtaatgtgcataatcttatttaatgtataatgtatacattgtaatagaaacagatttcccaaattccagcctggcatgag

SEQ ID NO: 849 - DNA, 550 bp, homo sapiens
ggactcatgaccacagtccatgccatcactgccacccagaagactgtggatggcccctccgggaaactgtggcgtgatggccgcggggctctccagaacatcatccctgcctctactggcgctgccaaggctgtgggcaaggtcatccctgagctgaacgggaagctcactggcatggccttccgtgtccccactgccaacgtgtcggtggtggacctgacctgccgtctagaaaaacctgccaaatatgatgacatcaagaaggtggtgaagcaggcgtcggagggccccctcaagggcatcctgggctacactgagcaccaggtggtctcctctgacttcaacagcgacacccactcctccacctttgacgctggggctggcattgccctcaacgaccactttgtcaagctcatttcctggtatgacaacgaatttggccacactcagtcccccaccacactgaatctcccctcctcacagttgccatgtagaccccttgaagaggggaggggcctagggagccgcaccttgtcatgtaccatcaata

SEQ ID NO: 850 - DNA, 438 bp, homo sapiens
ccatggacaatgcatgccctcgttatcttgaaaagcatacttccacaggctgcactcgaggagatccacaaattctcaggaacctacacctgcatgaacactttcaaagggcggacatagagacaggatgaagacatgcttgaggagccacggagtttgggggccacagcacctgggcacacacccgagcacctgtccattggcatgcttctgctgggtgagcaggacagctcctgtccccagcgaagaatccggctgcccctgggccagtcccaggacctttgcacaggactgatgggtgtaactgacccccacagggaggcaggaaaacagccagaagccaccttgacacttttgaacatttccagttctgtagagtttattgtcaattgcttctcaagtctaaccagcctcagcagtgtgcatagaccatttcca

SEQ ID NO: 851 - DNA, 463 bp, homo sapiens
gtggattgttagttcttctgctgttaggaagccactatgtctggacgtggaaagcaaggcggcaaagctcgggcaaaagctaaaacgcgttcttccagggccggtcttcagtttccagttggccgtgtgcaccgcctcctccgcaaaggcaactactccgaacgagtcggggccggcgctccagtgtacctggcagcggtgctggaatatctgacggccgagatcttagagctagctggcaacgcggctcgcgacaataagaagacccgcatcatcccgcgccacctgcagctagccatccgcaacgacgaggagctaaataagcttctaggtcgcgtgaccatcgcgcagggcggtgtcctgcccaacatccaggccgtattgctgcctaagaagacggagagccaccataaggccaagggcaagtgaaatgattactagtcaaatccgtcagtgatcccga

SEQ ID NO: 852 - DNA, 387 bp, homo sapiens
  misc_feature (141)..(141): n is a, c, g, or t
ctaaagatttggacccagaccgtgccactgccaactgccctcccgcccttgctcccttcccgggctggggccagtgggccctgcctaggggagatgtggacagcgccggcagctcgtgttcgcagtcaccctgaacgcccncctctgaactcccacgtgtctccattctcctaagctcaggtcgtcaaaggcaaacggagaagcccctttaggtcggagagtggtcagtattgcccacccagagctgggagaaaaacgggaaccccaagagaacctcttcccaccaaagcgcagccaccacgccacagatggcgcccttcaacagtgtgtaataccacaacatgctgtaatcgtttactctttacaaatttctttttcacgtactca

SEQ ID NO: 853 - DNA, 542 bp, homo sapiens
ctccattctgggaccatctccaggagtccatgagaggctttcttctcctatgtcccaattctcagaactcagatgtggctagaccaaccagtgggaaactgccccagcttctcccaccatagggggccggacccccatcaccagcctaggatccaggggctgcctctggcctcttagggagcagagagcagaactccgcagcccagcccagaggagtgtcacctcccacctttggagaggaatccttccctcccctggacaaagttgctgacaagctgctgaagtggcctctccatattccagctgagcctgaatctgactcttgagggttggggctgcacttatttattgcggggagacagctctctctcccacctcctccccagatgggaggagagcctgaggcccaagcaggacccgggggttccagcccctagctgctctggagtgggggaggttggtggaccatggagtccctggtgctgcccctcaggtgggacccaggggttctcagctgtaccctctgccgatggcatttgtgt

SEQ ID NO: 854 - DNA, 289 bp, homo sapiens
gtgtcccgcatgagatgtctgcagaatgagacttacagtgcgctgagccctggcaaaagtgaggacgttgtgcttcgatggagccaggagttcagcaccttgactctaggccagttcggatgagctggcgtctattctgcccacaccccagcccaacctgcccacgttctctattgttttgagaccccattgctttcaggctgccccttctgggtctgttactcggcccctactcacatttccttgggttggagcaacagtcccagagagggccacggtgggagctgcg

SEQ ID NO: 855 - DNA, 544 bp, homo sapiens
tggaggcctgcgtgttggatgaacttgacatggagctagccttcctgaccatgtctggcatggcatggaagagtttgaggacatggagagaagtctgccactatgcctgcagctctacgccccagggctgtcgccagaactatcatggagtgtgcaatgggggaccgcggcatgcagctcatgcacgccaacgcccagcggacagatgctctccagccaccgcacgagtatgtgccctgggtcaccgtcaatgggaaacccttggaagatcagacccagctccttacccttgtctgccagttgtaccagggcaagaagccggatgtctgcccttcctcaaccagctccctccggagtgtttgcttcgagtgttggccggtgggctgcggagagctcatggaaggcgagtgggaactcggctgcctgcctttttttctgatccagaccctcggcacctgctacttaccaactggaaaattttatgcatcccatgaagcccagatacacaaaattccacccctagatcaagaatcctgctccacta

SEQ ID NO: 856 - DNA, 340 bp, homo sapiens
attatgctttctattttgagatcattgcaaactcaacacaattgtaagtaatgatacagagggatcttgtgtacccttcacccagcctcccccaatggcaacatcttgcaaaactacaatgtagtctcataaccaggatattgacattgatacagtgaagatacaggacattctcatcaccacagggatccccaggatgcccacttccctccacccccacaccccagccgtgtccctaacccctggcaaccaggaatccactctccatttctataatgttgtcatttcaagaatgttattcaatggaatcatatagtatgtaacctgttttgagcttaaa

SEQ ID NO: 857 - DNA, 446 bp, homo sapiens
aacaggcagtcatctttaagggctatgcctaggcaaactactaacatgcattgtgagaatgccgtgtatacctcacgtactgtgtactttgtacatatattttaccttttatacctatgttcgattttgttttgttttgttctggctttgaggcttgttttgttgtctgtgtctgtctgaataacctgcgtgtctaaaaccacgtgaaatgtgaatgattattggcaatattaccttgacagaatcatgggactttgagaagagggaggacagaggcctctgtcgcactaacgctctcgtggttgctcgactgttgtatctgtgatacattatccgactaaggactctgggctggcagggccttctgccgggaaagctagaaacactaggttcttcctgtacatacgtgtatatatgtgaacagtgagatggccgtttctgacttg

SEQ ID NO: 858 - DNA, 552 bp, homo sapiens
aacttacatacaaatattacctcatttgttgtgtgactgagtaaagaatttttggatcaagcggaaagagtttaagtgtctaacaaacttaaagctactgtagtacctaaaaagtcagtgttgtacatagcataaaaactctgcagagaagtattcccaataaggaaatagcattgaaatgttaaatacaatttctgaaagttatgttttttttctatcatctggtataccattgctttatttttataaattattttctcattgccattggaatagaatattcagattgtgtagatatgctatttaaataatttatcaggaaatactgcctgtagagttagtatttctatttttatataatgtttgcacactgaattgaagaattgttggttttttcttttttttgttttttttttttttttttttttttttgcttttgacctcccatttttactatttgccaatacctttttctaggaatgtgcttttttttgtacacatttttatccattttacattctaaagcagtgtaagttgtatattactgtttct

SEQ ID NO: 859 - DNA, 475 bp, homo sapiens
gtggagagagctgcgatccatccaggccaagaccacagctctgtgatccttccggtggagtgtcggagaagagagcttgccgacgatgccttcctgtgcagagcttgggcatctcctttacgccagggtgaggaagacaccaggacaatgacagcatcgggtgttgttgtcatcacagcgcctcagttagaggatgttcctctggtgacctcatgtaattagctcattcaataaagcactttctttatttttctcttctctgtctaaccttctttttcctatctttttttcttctttgttctgtttacttttgctcatatcatcattcccgctatctttctattaactgaccataacacagaactagttgactatatattatgttgaaattttatggcagctatttatttatttaaattttttgtaatagttttgttttctaataagaaaaatccatgctttttgtagctggttg

SEQ ID NO: 860 - DNA, 507 bp, homo sapiens
acactcgcttctggaacgtctgaggttatcaataagctcctagtccagacgccatgggtcatttcacagaggaggacaaggctactatcacaagcctgtggggcaaggtgaatgtggaagatgctggaggagaaaccctgggaaggctcctggttgtctacccatggacccagaggttctttgacagctttggcaacctgtcctctgcctctgccatcatgggcaaccccaaagtcaaggcacatggcaagaaggtgctgacttccttgggagatgccataaagcacctggatgatctcaagggcacctttgcccagctgagtgaactgcactgtgacaagctgcatgtggatcctgagaacttcaagctcctgggaaatgtgctggtgaccgttttggcaatccatttcggcaaagaattcacccctgaggtgcaggcttcctggcagaagatggtgactggagtggccagtgccctgtcctccagataccactgagctcactgcc

SEQ ID NO: 861 - DNA, 571 bp, homo sapiens
gtttcttcattgatcaaccaggtttgggttacacaaatcaattgtgggggaaaaatcaaataaaacaattgcttattatattttccaaaggactgagcatttatcttttattcacgaagatatcatatgaggatgataatgatctttaacagattttttagagatagaatttataaagaggctgatactaagaatactacaatcaaaattgaagctagagaatgtaaaaatagaaagtaaatagttctaagaatattctggcataaattatttttatttagccaataaaatagcctccaaatgtatatctcagacaccatagagctgctaacaatgagaatcaaggaagatgcttgcacttagatttcgtttgttgtatttcagtagttctggatgtcctttgttaaaattggaaaatggaaaaatgtctcgacagaaatgtcaatctggtgattctgtgaactgtaaaatgttcacttttaaaaataaagttgtaaacaagttactcatataagttggtattacagtagcaaaaacagaaaaccatgtgatccatcctgtattttgattg

SEQ ID NO: 862 - DNA, 454 bp, homo sapiens
gtccttcacatcaccattttgagacctcagcttggcactcaggtgctgaagggtaatatggactcagccttgcaaatagccagtgctagttctgacccaaccacagaggatgctgacatcatttgtattatgttccaaggctactacagagaaggctgcctgctatgtatttgcaaggctgatttatggtcagaatttccctctgatatgtctagggtgtgatttaggtcagtagactgtgattcttagcaaaaaatgaacagtgataagtatactgggggcaaaatcagaatggaatgctctggtctatataaccacatttctgagcctttgagactgttcctgagccttcagcactaacctatgagggtgagctggtcccctctatatatacatcatacttaactttactaagtaatctcacagcatttgccaagtctcccaatatccaatt

SEQ ID NO: 863 - DNA, 499 bp, homo sapiens
gatacgctggggcccatgcagaaggagctggccgagcagctgggcctgtctactggcgagaaggagaagctgccgggagagctagagccggtgcaggccacgcagaacaagacagggaagtatgtgccgccgagcctgcgcgacggggccagccgccgcggggagtccatgcagcccaaccgcagagccgacgacaacgccaccatccgtgtcaccaacttgtcagaggacacgcgtgagaccgacctgcaggagctcttccggcctttcggctccatctcccgcatctacctggctaaggacaagaccactggccaatccaagggctttgccttcatcagcttccaccgccgcgaggatgctgcgcgtgccattgccggggtgtccggctttggctacgaccacctcatcctcaacgtcgagtgggccaagccgtccaccaactaagccagctgccactgtgtactcggtccgggacccttggcgacagaagacagcc

SEQ ID NO: 864 - DNA, 556 bp, homo sapiens
  misc_feature (55)..(55): n is a, c, g, or t
  misc_feature (126)..(126): n is a, c, g, or t
cactggccaagctgggccatgccagtgaccgcatcatcgccctggatggggacanccaaaaattccaccttctcggagatcttcaaaaaggagcacccggaccgcttcatcgagtgctacattgcngagcagaacatggtgagcatcgcggtgggctgtgccacccgcaacaggacggtgcccttctgcagcacttttgcagccttcttcacgcgggcctttgaccagattcgcatggccgccatctccgagagcaacatcaacctctgcggctcccactgcggcgtttccatcggggaagacgggccctcccagatggccctagaagatctggctatgtttcggtcagtccccacatcaactgtcttttacccaagtgatggcgttgctacagagaaggcagtggaactagccgccaatacaaagggtatctgcttcatccggaccagccgcccagaaaatgccatcatctataacaacaatgaggacttccaggtcggacaagccaaggtggtcctgaagagcaaggatgaccaggtgaccgttatcggggctg

SEQ ID NO: 865 - DNA, 510 bp, homo sapiens
gagccactctatgagttggacttcagtcttgcctaggcgattttgtctaccatttgtgttttgaaagcccaaggtgctgatgtcaaagtgtaacagatatcagtgtctccccgtgtcctctccctgccaagtctcagaagaggttgggcttccatgcctgtagctttcctggtccctcacccccatggccccaggccacagcgtgggaactcactttcccttgtgtcaagacatttctctaactcctgccattcttctggtgctactccatgcaggggtcagtgcagcagaggacagtctggagaaggtattagcaaagcaaaaggctgagaaggaacagggaacattggagctgactgttcttggtaactgattacctgccaattgctaccgagaaggttggaggtggggaaggctttgtataatcccacccacctcaccaaaacgatgaaggtatgctgtcatggtcctttctggaagtttctggtgccatttctgaactgttacaac

SEQ ID NO: 866 - DNA, 466 bp, homo sapiens
  misc_feature (168)..(168): n is a, c, g, or t
  misc_feature (361)..(361): n is a, c, g, or t
tgcgcgtgagcagactctatcggcagaaaagcagggtcttcgagccggtgcccgagggtgacggccactggcaggggcgcgtcaggacgctgctggagtgtggcgtgcggccggggcatggcgacttcctcttcactggccacatgcacttcggggaggcgcggctcnggctgtgccccacgcttcaaggacttccagaggatgtacagggatgcccaggagagggggctgaacccttgtgaggttggcacggactgactccgtgggccgctgcccttcctctcctgatgagtcacaggctgcggtgggcgctgcggtcctggtggggccgtgcggtgagggccgcgcgctgggagccgcntgccctgggcccaggcctgaccctggtaccgaagctgtggacgttctcgccacactcaaccccatgagcttccagccaaggatgccctggccgattggaaatgct

SEQ ID NO: 867 - DNA, 525 bp, homo sapiens
cgcccagcgtctagactgtagcatcttcctctgagcaataccgccgggcaccgcaccagcaccagccccagccccagctccctccggccgcagaaccagcatcgggtgttcactgtcgagtctcgagtgatttgaaaatgtgccttacgctgccacgctgggggcagctggcctccgcctccgcccacgcaccagcagccgcctccatgccctaggttgggcccctgggggatctgagggcctgtggcccccagggcaagttcccagatcctatgtctgtctgtccaccacgagatgggaggaggagaaaaagcggtacgatgccttcctgacctcaccggcctccccaagggtgccggcactctgggtggactcacggctgctgggccccacgtcaaaggtcaagtgagacgtaggtcaagtcctacgtcggggcccagacatcctggggtcctggtctgtcagacaggctgccctagagccccacccagtccggggggactgggagcagttccaagaccaccc

SEQ ID NO: 868 - DNA, 485 bp, homo sapiens
ccaagtctccaggcaggactatcaaaatggactccttcttcctatcagctctagaaccccagaggacttgcccagtaggccagctgagcacttaccaggcagcatctccctggccttccacagtctcgcctgtctgtctctggccttggtggacctggctccctccctaggaggcttttgccctcagcttgaatacagttcctggtgcatcaaagctgtaagttctcagctgctggcctgcactcatcacctcttcctacaaataaacatttggaaaaaagtccatcttcaatatgcttaaagagaagggtaggagataaggagaaagaacagatacggtttttttcccctttaaggcctttagattttgaggtactgtaaggggcctagaaggacaaaaggctttcattccctcttccttttggcaggcaggttatcagtccttggcagaagggcccagccctatccttttctgtatcaaacaa

SEQ ID NO: 869 - DNA, 560 bp, homo sapiens
  misc_feature (446)..(446): n is a, c, g, or t
gacaagtgctgaagtacatttttccttccagtactttgactcagataccacttcatattagacaaatgttttatattctctactgagtattttccattttcatagggctaatgtcattttcagttgtaataatcgattggcatagtgtcaatggaaattttttaagattgagtttgtagtgagcagacttttggaaggaacagtgctgacatccaatggatgctcaaagtaatacagaggaggaatctcctttcaaaaaaaaatgtacagacagtggaatggagaatgaattattccctaaaaaaaaaaagccactgtgggctggatgtggtagctcacccccggaatcccagcgcttttggatgccaaagtgggaggatcccttgagcccagaacttccagaccagcctgggcaacatagggagaccaccctctacataaaaaanaaaaataaagcttttaagctaacctggtggcgtgatgggatgcacctctggtcccagctactccagaagctgagaagggcaaatcgcttgagttcaaggagttcgaggttggag

SEQ ID NO: 870 - DNA, 531 bp, homo sapiens
ggagtttgccaatggcctgctgaacaaggtcgtcacctcttccatcatggtgctagtctgcgccatcaacctctacttcgtggtcagctatctgcccagcctgccccaccctgcctacttcggccttgcagccttgctggccgcagcctacctgggcctcagcacctacctggtctggacctgttgccttgcccacggagccacctttctggcccacagctcccaccaccacttcctgtatgggctccttgaagaggaccagaaaggggagacctctggctaggcccacaccagggcctggctgggagtggcatgtatgacgtgactggcctgctggatgtggagggggcgcgtgcaggcagcaggatagagtgggacagttcctgagaccagccaacctgggggctttagggacctgctgtttcctagcgcagccatgtgattaccctctgggtctcagtgtcctcatctgtaaaatggagacaccaccacccttgccatggaggttaagcactttaacacagtgtctgg

SEQ ID NO: 871 - DNA, 456 bp, homo sapiens
atacaaagtacttctgttggtcacagaaacatgaccagattttgcatatctccaggtagggaactaagtagactaccttatcaccggctaagaaaacttgctactaaactattaggccatcaatggcttgaataaaaaccagagaaggtttttcccaggacgtctcatgtttggccctttagaattggggtagaaatcagaaatgagatgaggggaagaagcaaggagtctaaggccctagcgatttgggcatctgccacattggttcatattcagaaagtgttatctcattgattatattcttgttaagcaaatctccttaagtaattattattcaaataagattatactcatacatctatatgtcactgttttaaagagatatttaatttttaatgtgtgttacatggtctgtaaatatttgtatttaaaaatgccatgcattaggctttggaa

SEQ ID NO: 872 - DNA, 278 bp, homo sapiens
ggccgtgcggagattcaaggacctaagcttccaggaggagtacagcacactgttccctgcctcggcacagccgtaggcctccccggcttgcagaggccggcagccctgtatcacccctggcagtgaggtggcaggagcagcctagtgccagaaatgtccaagatgccagggcatgcagggcagtggaaggctggcttgaggaaccaattcaggttctccactgactcattcattccttcaccgcctccttcattgattcttcatgcgttcattcattc

SEQ ID NO: 873 - DNA, 406 bp, homo sapiens
ggctgcctgcggatgaaggaccagtgtgacaagtgccgggagatcttgtctgtggactgttccaccaacaacccctcccaggctaagctgcggcgggagctcgacgaatccctccaggtcgctgagaggttgaccaggaaatataacgagctgctaaagtcctaccagtggaagatgctcaacacctcctccttgctggagcagctgaacgagcagtttaactgggtgtcccggctggcaaacctcacgcaaggcgaagaccagtactatctgcgggtcaccacggtggcttcccacacttctgactcggacgttccttccggtgtcactgaggtggtcgtgaagctctttgactctgatcccatcactgtgacggtccctgtagaagtctccaggaagaacccta

SEQ ID NO: 874 - DNA, 500 bp, homo sapiens
ccgcctcgatacacgggacgttgagcacaacgtatctcctggctacaatttcaggtttgccaagtactacagagacctggctggcaacgagcagcgcacgctcatcaaggcctatggcatccgcttcgacatcattgtgtttgggaaggcagggaaatttgacatcatccccactatgatcaacatcggctctggcctggcactgctaggcatggcgaccgtgctgtgtgacatcatagtcctctactgcatgaagaaaagactctactatcgggagaagaaatataaatatgtggaagattacgagcagggtcttgctagtgagctggaccagtgaggcctaccccacacctgggctctccacagccccatcaaagaacagagaggaggaggagggagaaatggccaccacatcaccccagagaaatttctggaatctgattgagtctccactccacaagcactcagggttccccagcagctcctgtgtgttgtgtgca

SEQ ID NO: 875 - DNA, 131 bp, homo sapiens
  misc_feature (85)..(85): n is a, c, g, or t
gcactgggaggcccaagagccaatccagatgcctgagacaacggagactgtgctctgtgccctgggcctggtgctgggcctagtnggcatcatcgtgggcaccgtcctcatcataaagtctctgcgttctg

SEQ ID NO: 876 - DNA, 409 bp, homo sapiens
gaggcgatggagagctggacactgatgaggctgggtcacttatgggcataaaaacctgggcctctgggttaaagctgtttttgatctccttatccaactcacatccattttcattattatcatccacgtaaagcaccttcactggtcccttttcaccaatttggtaagaaacctcaaatgggtcgatccaaacactaagatcctgtggcagattgccacgaacatcatcaatgtccaaaccactctctttggatgcttgttcaatcactgggtccactttctcccctatgtgtatacatctaaaccccgatcctttgtatggcttttcaggataccagtgcccttcatatttcttcttaagaagtctttcaagttcttcaccaaaaatgttgacacgtctcctgggaag

SEQ ID NO: 877 - DNA, 504 bp, homo sapiens
gaagagaccctgatgttctgcatgagggtgatggtgggagtcatcatcctctatgaccatgtccaccctgtgggagctttctgcaagacatccaagatcgatatgaaaggctgcataaaagttttgaaggagcaggccccagacagtgtggaggggctgctaaatgccctcaggttcactacaaagcacttgaacgatgaatcaacttccaaacagattcgagcaatgcttcagtagagctctgctcaaagaagaggatctatgtgctgacctcagaagatgtatatgtttacataatttaatacagattgatgttaatacttgtgtatttacataaccgtttccttcttgtcactgaaatatatggaccttaatttgtatcctgactgactcaacccagcagagcataaattgacttgagagccttacctttgatgtctgaaatgaaacccccttctccaaaggcaaaattcggagactttgatctttgctactggagtcctt

SEQ ID NO: 878 - DNA, 414 bp, homo sapiens
ctcgttgcaatcgcctttgcagtcaaccacttctggtgccaggaggagccggagcctgcacacatgatcctgaccgtcggaaacaaggcagatggagtcctggtgggaacagatggaaggtactcttcgatggcggccagtttcaggtccagtgagcatgagaatgcctatgagaatgtgcccgaggaggaaggcaaggtccgcagcaccccgatgtaaccttctctgtggctccaaccccaagactcccaggcacatgggatggatgtccagtgctaccacccaagccccctccttctttgtgtggaatctgcaatagtgggctgactccctccagccccatgccggccctacccgcccttgaagtatagccagccaaggttggagctcagaccgtgtctaggttggggctcg

SEQ ID NO: 879 - DNA, 407 bp, homo sapiens
caggacttcatcatgctgcagaacaacgagcacagaattgcgcagtacctggccacttatggccccatcaccgtgaccatcaacatgaagccccttcagctataccggaaaggtgtgatcaaggccacacccaccacctgtgacccccagcttgtggaccactctgtcctgctggtgggttttggcagcgtcaagtcagaggaggggatatgggcagagacagtctcatcgcagtctcagcctcagcctccacaccccaccccatactggatcctgaagaactcctggggggcccaatggggagagaagggctatttccggctgcaccgagggagcaatacctgtggcatcaccaagttcccgctcactgcccgtgtgcagaaaccggatatgaagccccgagtctc

SEQ ID NO: 880 - DNA, 261 bp, homo sapiens
  misc_feature (39)..(39): n is a, c, g, or t
ttttgaagcaagagcaccccgagttggcagtcctcgcanactcggttgaccttcaggagtccacagggatagcttccgacagctccagcgactcttccagctcctccagctccagttcgtcagactccgactcagagtgcgagtctggatccgagggcgatgggacagtgcaccgcaggaagaagaggaggacgtgcagcatggtgggaaacggggacaccacctcccaggacgactgtgtcagcaaagagcgcagctcct

SEQ ID NO: 881 - DNA, 251 bp, homo sapiens
  misc_feature (78)..(82): n is a, c, g, or t
gtgaaccgagacttgtacaggatgaagagcaggcaccttctggacatggatgagcagtccaaagcatggacgatttannnnncagaagattctggaagaagagcaaagtcagcctcaattatttaccagcacaatccaatcaacatgatctgccagaatggacccaacagctggatttccattgcaaactccgaagccatccagattggacacgggaacatcattacaagacagacagtctccagggagga

SEQ ID NO: 882 - DNA, 314 bp, homo sapiens
aagagtggtcagatgtttgccaaggaagatttgaaacggaagaagcttgtacgtgatgggagtgtgtttctgaagaatgcagcaggaaggttgaaagaggttcaagcagttcttctcactgacattttagttttccttcaagaaaaagaccagaagtacatctttgcatcattggaccagaagtcaacagtgatctctttaaagaagctgattgtgagagaagtggcacatgaggagaaaggtttattcctgatcagcatggggatgacagatccagagatggtagaagtccatgccagctccaaagaggaacg

SEQ ID NO: 883 - DNA, 421 bp, homo sapiens
gagccattggaagactgtcctctatggcaatgatctcagggctcagtggcaggaaatcctcaacagggtcaccaaccagcccgctcaatgcagaaaaactagaatctgaagatgtgtcccaagctttccttgaggctgttgctgaggaaaagcctcatgtaaaaccctatttctctaagaccattcgcgatttagaagttgtggagggaagtgctgctagatttgactgcaagattgaaggatacccagaccccgaggttgtctggttcaaagatgaccagtcaatcagggagtcccgccacttccagatagactacgatgaggacgggaactgctctttaattattagtgatgtttgcggggatgacgatgccaagtacacctgcaaggctgtcaacagtcttggagaagccacctgcac

SEQ ID NO: 884 - DNA, 497 bp, homo sapiens
  misc_feature (107)..(107): n is a, c, g, or t
  misc_feature (349)..(351): n is a, c, g, or t
gtagattccgatgcaacaccatgcaaaaccccgaaacagctgctttgccgtccgtccactgggaaccgagtagggtcgcaagatgtatccttggagtcctctcaggncagttgggaaaatgcaaagcacccaaaccactaacacatccaacagcaccaacaaatctcagcatggatcagcaaggctctttcgttcttccagcaaaggcttccaaggtacaactcaaacaagccatggttccttgatgacaaacaaacaacatcaaggcaaatccaataatcagtattaccatggcaaaaagaggaaacacaagagggacgcgcccctctcagacctctgtagatagtcnnngctgcgcggtggactgtcttctctgtgcaatgatctcatgctcaggacagttgcgcagggactcctgggagatattcaggagcctcacactgttcagacgttgacttagcaactgcgttttttcccagctcgccacagaatggatc

SEQ ID NO: 885 - DNA, 317 bp, homo sapiens
gcattccatttagtctttcctagaggcagggaaatgggctaggtggcctttggagcacactgctggcttggtaaatttctgatcttacagatgaaataagaggccttaaaaagtataaggcctttggctcctaagcactaatctgggcaggttagaaagctactcagggctttgggcgaaagccccatatgcccattcagtaagtatataaaaccaggattggcttattgccctcaccattcacgtgcaaatttatcccttcccttcaacattggaaggggcctaaagtgggtgaccccagatttgcgtttcagttc

SEQ ID NO: 886 - DNA, 576 bp, homo sapiens
  misc_feature (99)..(99): n is a, c, g, or t
  misc_feature (101)..(101): n is a, c, g, or t
aaactggtcagctagagattcttttttctttctaagctgagcacgtagtctgttcagagcttgtttcttccgggagtttgggtcccccattttgaaatncnggtggtactaaagcctttggaaattgtcactaaactatgggcactttttcttaagactcaagtacaacagaaacaagtcattttttttcctgctaatatgattgattagcgaaaatcacgactataacccaaaaactgcaccttctgtcaatattagcagactgtcatattacagggtcaagaaacaaaagctgctgtccagtcatgtttggacaataacgtttggggtcagacgggaaaaagggaggaaagaaaggaaagaaagaggagaaaataactaactttctggaaaacacatttggcttaactgccaaaataaaggctttgcggagaaatgaaaagcctataatcaggatttaggtgtgcaataaaacacagctgacaccagaccaatccctaaaatccatccggattttcccccctttttagaaaagggattaaggaacagggagggggaagtgtgatccttgctttc

SEQ ID NO: 887 - DNA, 373 bp, homo sapiens
ccatgctagcgggccgctgagtcggaatccgtggctgtgttaggataacttgctcaggattgcacggctggtgagcagcagtcagaactccatccacctctcctgataccaggccaggttcctttactccagagttctcaaagcaggggtctcacgtcttctttagtctttagagagacattttcaactgactccttagtggctaagcaagcttcagaaatttctcaacaagaagcttccacacaatcaaaggtccctgcctgcgtctgtagcagccaagagctgttaagaaaggagattggagcaggtggccttgtgcaggggaggggatgggtgggaggtggccgtgcaagctctgcattgtcatggacgg

SEQ ID NO: 888 - DNA, 387 bp, homo sapiens
aacatcccagtttatacttagcaaggattaggtgacatgaagacgatcctggcttgatgggtcatgaggctctgaaggaaaagtgggagaaaataagaggtaaacgagcctagcctacagcctcccagaggccagccctgacccagcacagctgggagccccgtgaggaaggcccggctccgtaggggcctcacacaaggagtgtttggcttacagtgaattgtccggggggttttgcccacctcctcctcatctccgtattcttcagcttcatccaaaactgacttagaagcctcccttgaccctcacctgactattcacaggttatagcactttatgtttttcagttctgttattttaattggtgcctctgtttgtgatctttaa

SEQ ID NO: 889 - DNA, 265 bp, homo sapiens
ccggaaccgacgagtcctgaggagagaaccggtgcgtcctgaggagagaaccggcgctgggcaacacgggcctgcaaactcgacaggaccctgcccgaggggccctcgcgccaacctggaccggtccccgcctcctccgctgcccaatctctcagacccaccccacctgcaggcccagaccacgtgggacagaactcctgcccaccctaccccgagggaggcgaacccgcacttccaggcttgggaggaccatggggcacaatgc

SEQ ID NO: 890 - DNA, 539 bp, homo sapiens
aagggcagtttgctggatttcctgaagagcgatgaaggtggcaaagtgctgcttccaaagctcattgacttttctgctcagattgcagagggaatggcatacatcgagcggaagaactacattcaccgggacctgcgagcagctaatgttctggtctccgagtcactaatgtgcaaaattgcagattttggccttgctagagtaattgaagataatgagtacacagcaagggaaggtgctaagttccctattaagtggacggctccagaagcaatcaactttggatgtttcactattaagtctgatgtgtggtcctttggaatcctcctatacgaaattgtcacctatgggaaaattccctacccagggagaactaatgccgacgtgatgaccgccctgtcccagggctacaggatgccccgtgtggagaactgcccagatgagctctatgacattatgaaaatgtgctggaaagaaaaggcagaagagagaccaacgtttgactacttacagagcgtcctggatgatttctacacagc

SEQ ID NO: 891 - DNA, 544 bp, homo sapiens
gccaatcctgaatctgcaacaactttcaaggtccttgctgcgaaagtgctcaaccttgtgctgccaaacttgtccctcgggcccatcgactccagcgtgctctctcggaataagacagaggtcgacatttataactcagaccccctgatctgccgggcagggctgaaggtgtgcttcggcatccaactgctgaatgccgtctcacgggtggagcgcgccctccccaagctgactgtgcccttcctgctgctccagggctctgccgatcgcctatgtgacagcaaaggggcctacctgctcatggagttagccaagagccaggacaagactctcaagatttatgaaggtgcctaccatgttctccacaaggagcttcctgaagtcaccaactccgtcttccatgaaataaacatgtgggtctctcaaaggacagccacggcaggaactgcgtccccaccctgaatgcattggccggtgcccggctcatggtctgggggatgcaggcaggggaagggcagagatggcttctcagatatggcttgca

SEQ ID NO: 892 - DNA, 501 bp, homo sapiens
agactggggtggtgtccacaggcctgatccacaatggagactggaccttccagaccctggtgatgctggaaacagttcctcggagtggagaggtttacacctgccaagtggagcacccaagcgtgacaagccctctcacagtggaatggagagcacggtctgaatctgcacagagcaagatgctgagtggagtcgggggctttgtgctgggcctgctcttccttggggccgggctgttcatctacttcaggaatcagaaaggacactctggacttcagccaagaggattcctgagctgaagtgcagatgacacattcaaagaagaactttctgccccagctttgcaggatgaaaagctttccctcctggctgttattcttccacaagagagggctttctcaggacctggttgctactggttcagcaactgcagaaaatgtcctcccttgtggcttcctcagctcctgttcttggcctgaagccccacagctttgatggcag

SEQ ID NO: 893 - DNA, 512 bp, homo sapiens
tcttctacgggatgagctctgacaccgccatgaacaagcacgcaggaggagttgctgagtacagagcctctgagggtaagactgtggaagttccttacaaaggagatgtggaaaacactatcctggatattctcgggggactgaggtccacgtgcacctacgtgggggccgccaaactcaaggagctcagcaggagggcaacattcatccgggtgacccagcagcacaacaccgtgttcagctaaccctggggacaaagcagcgtctggctcgatggaagcgtccaaacctgcttttcccatctccccccaagtctgttccgtcagagcttctggctgctcctgaatggtggaatgcctgtgtcctctcttctgtctcctgccgcctggaggcttcggggctctcccgcctgccttctcggggcccagacgcaaggcaccgattgggccaacatcagagccctgctgcccagaactcataacctcattgttcaaaccaacacttgcaccttt

SEQ ID NO: 894 - DNA, 425 bp, homo sapiens
  misc_feature (46)..(46): n is a, c, g, or t
  misc_feature (78)..(78): n is a, c, g, or t
  misc_feature (84)..(84): n is a, c, g, or t
  misc_feature (93)..(93): n is a, c, g, or t
  misc_feature (98)..(98): n is a, c, g, or t
  misc_feature (102)..(102): n is a, c, g, or t
  misc_feature (120)..(120): n is a, c, g, or t
  misc_feature (150)..(150): n is a, c, g, or t
  misc_feature (166)..(166): n is a, c, g, or t
  misc_feature (173)..(173): n is a, c, g, or t
  misc_feature (175)..(175): n is a, c, g, or t
  misc_feature (186)..(186): n is a, c, g, or t
  misc_feature (219)..(219): n is a, c, g, or t
  misc_feature (236)..(236): n is a, c, g, or t
  misc_feature (297)..(297): n is a, c, g, or t
  misc_feature (299)..(299): n is a, c, g, or t
  misc_feature (310)..(310): n is a, c, g, or t
  misc_feature (348)..(348): n is a, c, g, or t
  misc_feature (366)..(366): n is a, c, g, or t
  misc_feature (370)..(370): n is a, c, g, or t
  misc_feature (396)..(396): n is a, c, g, or t
tggcgggctcagtctgaatctgcccagagcaagatgctgagtggcnttggaggcttcgtgctggggctgatcttcctngggctnggccttatnatccntcanaggagtcagaaagggctnctgcactgactcctgagactattttaactnggattggttatcactnttctgtnangcctgcttgtncctgcccagaattcccagctgcctgtgtcagcntgtccccctgagatcanagtcctacagtggctgtcacgcagccaccaggtcatctcctttcatccccaccccaaggcngntggctgtgacnctgcttcctgcactgacccagagcctctgcctgtgcanggccagctgcgtctactnaggncccaaggggtttctgtttctattctntcctcagactgctcaagagaagcacatga

SEQ ID NO: 895 - DNA, 414 bp, homo sapiens; identical to SEQ ID NO: 824

SEQ ID NO: 896 - DNA, 298 bp, homo sapiens
ctctcggtgactactatcgctgtcatgtctggtcgtggcaagcaaggaggcaaggccgcgccaaggcaagtcgcgctcgtccggctggccttcattccggagcgagtgcatcgttgctgcgaaaggcaactacgcgggcagtgggggccggcgcccgtctacatggctgcggtcctcgagtatctgaccgccgagatcctggagctggcgggcaacgcggctcgggacaacaagaagacgcgcatcatccctcgtcacctccagctggccatccgcaacgacgaggaactgaacaagc

SEQ ID NO: 897 - DNA, 468 bp, homo sapiens
tgtccacaggcctgatccagaatggagactggaccttccagaccctggtgatgctggaaacagttcctcggagtggagaggtttacacctgccaagtggagcacccaagcctgacgagccctctcacagtggaatggagagcacggtctgaatctgcacagagcaagatgctgagtggagtcgggggcttcgtgctgggcctgctcttccttggggccgggctgttcatctacttcaggaatcagaaaggacactctggacttcagccaacaggtaataccttttcatcctctttaagaaacagatttggaggccaggcgcagtggctcacgcctgtaatcccagcactttgggaggccgaggcgggcgaatcatgaggtcaggagttcgagaccagcctgaccaacgtggtgaaaccccgtctctactaaaaatacaaaaaaaaatcagtcgggcgtggtggtgtgc

SEQ ID NO: 898 - DNA, 420 bp, homo sapiens
  misc_feature (33)..(33): n is a, c, g, or t
tttatagaggaccccctgcacaaagctggatgntgcacattttgtaccgcatgctttgggatcgacttttatcccacttgtatctagtgacaaagtgcacgttactgtgatcaatttcagctgtctactagtgactgtattgtgatatgcatcttgtttcatttttcacttactaatcaaaaagcctgctttgcctctcttgactagtttgtgttttagatgtcatcataatttgctgaaatatttatgatctagcatgattccttatctgagacttcttgctgccttttcacagcactattaagaattgcttcagtaactgctgtcctaagtgattgttgagaatgttctgaatttcgatgcttattttattaccccaacttcaaatagaacttagccatttgaacttcctaacttcct

SEQ ID NO: 899 - DNA, 134 bp, homo sapiens
gatgaagattgagcggcctgtaacagtgtttctgcaactgaaacgcaagcgaggaggggacgtgtctgattccaaacagttcacctattaccctctggtggaagacaaggaagaggtgcagcggaagcggagga

SEQ ID NO: 900 - DNA, 366 bp, homo sapiens
catggggggacttgaaccctgcagcaggctcctgctcctgcctctcctgctggctgtaagtggtctccgtcctgtccaggcccaggcccagagcgattgcagttgctctacggtgagcccgggcgtgctggcagggatcgtgatgggagacctggtgctgacagtgctcattgccctggccgtgtacttcctgggccggctggtccctcgggggcgaggggctgcggaggcagcgacccggaaacagcgtatcactgagaccgagtcgccttatcaggagctccagggtcagaggtcggatgtctacagcgacctcaacacacagaggccgtattacaaatgagcccgaatcatgacagtcagcaa

SEQ ID NO: 901 - DNA, 443 bp, homo sapiens
  misc_feature (131)..(131): n is a, c, g, or t
  misc_feature (145)..(159): n is a, c, g, or t
gcctgagatgtgtcccgatggattcttcgccagcgggttctcgctcaaggtggagcctccccaaggcattcctggcgacgacactgcactgaatgggatcaggctgcactgcgcgcgcgggaacgtcctangcaatacgcacgtnnnnnnnnnnnnnnngctggggcgaatggagtgagccgctgtggtgtcgcggcggcgcctacctagtggctttctcgcttcgcgtggaggcacccacgaccctcggtgacaacacagcagcgaacaacgtgcgcttccgctgttcagacggcgaggaactgcaggggcctgggctgagctggggagactttggagactggagtgaccattgccccaagggcgcgtgcggcctgcagaccaagatccagggacctagaggcctcggcgatgacactgcgctgaacgacgcgcgcttattc

SEQ ID NO: 902 - DNA, 391 bp, homo sapiens
agcagacattctctggaggcacctctcaagatacaaaagcatctgagagctcgaagccatggccagatgccacctacggcactggttctgcatcacgggcctcagcagtttctgagctgagtcctcgggagcgaagcccagctctcaaaagccccctccagtctgtggtggtgaggcggcggtcaccccgtcctagccccgtgccaaaacctagtcctccactttccagcacatcccagatgggctcaactctgccgagtggtgccgggtatcagtctgggacacaccaaggtcagttcgaccatggttctgggtccctgagtccatccaaaaagagccctgtgggtaagagtccaccatccactggctccacatatggctcatctcagaa

SEQ ID NO: 903 - DNA, 308 bp, homo sapiens
cctgccagctgagcgcatgactaagcatggtgaggacatggcccttggcggctcctgctcttcctgttgtctccgtccccacactgtctccctcttcccttccatctgtgtctgcacagagcaaacacagcattatctacacaggaatgtagattctttgtctccagcaaagaattcaacccaaactgatttcctctgtttggcttggttgatagcgtgggcttagttggaaatgaagctaaggggcctgagtctaatcttagcaagctgcccatcacagagaagatgccaacgaattatttgctgca

SEQ ID NO: 904 - DNA, 471 bp, homo sapiens
gctgatggagatcgtcacctacggccggatcccttacccagggatgtcaaaccctgaagtgatccgagctctggagcgtggataccggatgcctcgcccagagaactgcccagaggagctctacaacatcatgatgcgctgctggaaaaaccgtccggaggagcggccgaccttcgaatacatccagagtgtgctggatgacttctacacggccacagagagccagtaccaacagcagccatgatagggaggaccagggcagggcagggggtgcccaggtggtggctcgaaggtggctccagcaccatccgccagggcccacacccccttcctactcccagacacccaccctcgcttcagccacagtttcctcatctgtccagtgggtaggttggactggaaaatctctttttgactcttgcaatccacaatctgacattctcaggaagcccccaagttgatatttctatt

SEQ ID NO: 905 - DNA, 512 bp, homo sapiens
  misc_feature (169)..(169): n is a, c, g, or t
cccacctggcatatactggctggcctcttctctgtcacaggggtcttagtcgtgaccacatggctgttgtcaggtcgtgctgcggttgtcccattggggacttggcggcgactgtccctgtgctggtttgcagtgtgtgggttcattcacctggtgatcgagggctggnttcgttctctactacgaagacctgcttggagaccaagccttcttatctcaactctggaaagagtatgccaagggagacagccgatacatcctgggtgacaacttcacagtgtgcatggaaaccatcacagcttgcctgtggggaccactcagcctgtgggtggtgatcgcctttctccgccagcatcccctccgcttcattctacagcttgtggtctctgtgggccagatctatggggatgtgctctacttcctgacagagcaccgcgacggattccagcacggagagctgggccaccctctctacttctggttttactttgtcttcatgaatgccctgtggc

SEQ ID NO: 906 - DNA, 273 bp, homo sapiens
  misc_feature (68)..(68): n is a, c, g, or t
aggaacagacctttggcttggagttgatgcccttggactgaatatttatgagaaagatgataagttanccccaaagattggctttccttggagtgaaatcaggaacatctctttcaatgacaaaaagtttgtcattaaacccatcgacaagaaggcacctgactttgtgttttatgccccacgtctgagaatcaacaagcggatcctgcagctctgcatgggcaaccatgagttgtatatgcgccgcaggaagcctgacaccatcgaggtgca

SEQ ID NO: 907 - DNA, 166 bp, homo sapiens
  misc_feature (34)..(34): n is a, c, g, or t
gatacaacgtgtttcctaaaagtagagggaggtnagagacggtagcacctgcggggcggcttgcacgccgagtgcctgtgacgcgccggcttgacttaactgcttccctgaagtaccgtgaggttcctgatgtgcgggcggtagacggtaggcttatgcggcacgc

SEQ ID NO: 908 - DNA, 474 bp, homo sapiens
gagtgagtcccagttacatcaaacagtgacttccagttattccccagtaagtctgagtggttccttcaagctgggtgtctttccagcctttgccagtctagccccagcagggcaccgtgtatgaatgcagtttggtgctgttttagagtatgcctgctccccagccccctgcctggaaccctctgagcaacttgctctgacctataatgtcttaggtgcaacacggaccccaccagagctcttggatacccccctagatccatgtggctttatgtgaggggactgaatgcagacacaccatagcccccttctactactttccctctcgccctgccacctagttccacatggaaccaacaagttgagtgcatccctgttgggtgttttgtgttgagactggctgaaatgaggagactttgaccatgtgacgtgtcaacagactcaaggagacaaccacctcaactgggtcatgtg

SEQ ID NO: 909 - DNA, 531 bp, homo sapiens
  misc_feature (234)..(234): n is a, c, g, or t
  misc_feature (398)..(398): n is a, c, g, or t
gttgcattcaagtttaccgcctctacttcactgcagaatctgactgccgtcagatctgtatgacagattgttgcattcgttttctgcgggtacgtcactatccagtctactttttccattgacgtggctgagtcatatgtagtatgactgtcagagacgttggaacctgaagcgaccccattttgagtgagggctagaaaaatgaggccgggacttacgggcctgcattctcanaaggatattcctagctttcagatacttacggttaagggaacaaattaatgtttactgaagagacccgagtgtccagatagctggatatctggagaacaaaggcgttcctaattttgctttaaaggtagtaatagggattcttgcaaaatgtaataattaaagtnaattatcacaaacccttgtaacagaacacctctccccatgtgtacaagcattgtacctagggtggatacgttccttctcttagtttcaggaacgcccttctctgtctgtggagtagctgttctttcaccactt

SEQ ID NO: 910 - DNA, 551 bp, homo sapiens
  misc_feature (43)..(43): n is a, c, g, or t
  misc_feature (52)..(52): n is a, c, g, or t
  misc_feature (56)..(57): n is a, c, g, or t
  misc_feature (59)..(61): n is a, c, g, or t
  misc_feature (63)..(65): n is a, c, g, or t
  misc_feature (67)..(68): n is a, c, g, or t
  misc_feature (250)..(253): n is a, c, g, or t
  misc_feature (261)..(261): n is a, c, g, or t
  misc_feature (263)..(263): n is a, c, g, or t
  misc_feature (270)..(270): n is a, c, g, or t
  misc_feature (346)..(348): n is a, c, g, or t
  misc_feature (350)..(351): n is a, c, g, or t
  misc_feature (353)..(353): n is a, c, g, or t
  misc_feature (355)..(364): n is a, c, g, or t
  misc_feature (366)..(366): n is a, c, g, or t
  misc_feature (368)..(368): n is a, c, g, or t
  misc_feature (370)..(370): n is a, c, g, or t
  misc_feature (372)..(372): n is a, c, g, or t
  misc_feature (378)..(379): n is a, c, g, or t
  misc_feature (381)..(382): n is a, c, g, or t
  misc_feature (384)..(387): n is a, c, g, or t
  misc_feature (431)..(431): n is a, c, g, or t
  misc_feature (441)..(441): n is a, c, g, or t
gagtttgagaacagattggacaacaaagtgagatcccatctcnacaaaaaanaaannannnannnanngcagtacttgcctgtagtccaagctactcaggaggctgaagagggaggatcactccaaggccaggagttaaaggctacagtgagctataatcacaccactgcactccagcctgggtgacagatcctttttttaaaaaattaaatactttctaaaaagcctttgaaaactcaaagaaagctgnnnnatccttanancttgatncactattaaagccaaggtttattcccattaactaagccacctggaaaagtttaggaatagcagaaacactgccatnnntnncntnnnnnnnnnnancncnanaaaggnngnnannnncctgctccggctgcgagagaagcttctccttcttggagatctanaagcagaaanaggaaaattaggctcatcatcaattagtatttatggcgtgaggcatttcccaacttttcaatctcactgttgggcccagtgaatgtgccgaagaactggcacccatcgtc

SEQ ID NO: 911 - DNA, 458 bp, homo sapiens
taaaaacctgtatctgacccactttgtaatttttgctccaatatccattctgtagacttttgaaaaaaaagtttttaatttgatgcccaatatattctgaccgttaaaaaattcttgttcatatgggagaagggggagtaatgacttgtacaaacagtatttctggtgtatattttaatgtttttaaaaagagtaatttcatttaaatatctgttattcaaatttgatgatgttaaatgtaatataatgtattttctttttattttgcactctgtaattgcactttttaagtttgaagagccattttggtaaacggtttttattaaagatgctatggaacataaagttgtattgcatgcaatttaaagtaacttatttgactatgaatattatcggattactgaattgtatcaatttgtttgtgttcaatatcagctttgataattgtgtaccttaag

SEQ ID NO: 912 - DNA, 230 bp, homo sapiens
  misc_feature (50)..(50): n is a, c, g, or t
  misc_feature (56)..(56): n is a, c, g, or t
  misc_feature (174)..(174): n is a, c, g, or t
gaaagtgagatcttggctatggctggaggtcagtcactttatggcataanttattngggaggtaaaaagactgttttcaattcaaattgtgcatttattggcatctaaatctagcatgattttggttagagcacaaaagaaataccacataataccaaatcacagcaaatgttngaattaatacaacaaaattttcctttggctagaaatcttatgttatacctgaaaaa

SEQ ID NO: 913 - DNA, 507 bp, homo sapiens
gattccacagaatttcatagctgactactttgagacgagcagccagtgctccaagcccggtgtcatcttcctaaccaagcgaagccggcaggtctgtgctgaccccagtgaggagtgggtccagaaatatgtcagcgacctagagctgagtgcctgaggggtccagaagcttcgaggcccagcgacctcggtgggccagtggggaggagcaggagcctgagccttgggaaacatgcgtgtgacctccacagctacctcttctatggactggttgttgccaaacagccacactgtgggactcttcttaacttaaattttaatttatttatactatttagtttttgtaatttattttcgatttcacagtgtgtttgtgattgtttgctctgagagttcccctgtcccctcccccttccctcacaccgcgtctggtgacaaccgagtggctgtcatcagcctgtgtaggcagtcatggcaccaaagccaccagactgacaaatgtgtatc

SEQ ID NO: 914 - DNA, 551 bp, homo sapiens
ccatccagaatctagcgctgcgcaacacaggaatggagacgcccacaggcgtgtgcgccgcactggcggcggcaggtgtgcagccccacagcctagacctcagccacaactcgctgcgcgccaccgtaaaccctagcgctccgagatgcatgtggtccagcgccctgaactccctcaatctgtcgttcgctgggctggaacaggtgcctaaaggactgccagccaagctcagagtgctcgatctcagctgcaacagactgaacagggcgccgcagcctgacgagctgcccgaggtggataacctgacactggacgggaatcccttcctggtccctggaactgccctcccccacgagggctcaatgaactccggcgtggtcccagcctgtgcacgttcgaccctgtcggtgggggtgtcgggaaccctggtgctgctccaaggggcccggggctttgcctaagatccaagacagaataatgaatggactcaaactgccttggcttcaggggagtcccgtcaggacgttgaggacttttcgaccaattcaacc

SEQ ID NO: 915 - DNA, 392 bp, homo sapiens
gaacctttatttattgcctaccacatgttatgggctgaataatggcccccaaagatatctgtgtcctaatcctcagaacttgtgactgttaccttctgtggcagaaagggacagtgcagatgtatgtaagttaaggactttgagatagagaggttattcttgctgattcaggtgggcccaaaatatcaccacaagggtcctcataagaaagaggccagaaggtcaaagaggtagagacaaagtgatgatggaagtggacgtgggtgtgacgtgagcaggggccatgaatgccgcagccttcagatgccagaaagggaaaggaatggattcccctgcctggagcctccaaaagaaaccagccctgcccacgccttgacttgagcccattgaaa

SEQ ID NO: 916 - DNA, 467 bp, homo sapiens
ccatgatcatggtttactgcgcgtccgaatggtcaaccttcaagtggaagattctggactgtatcagtgtgtgatctaccagcctcccaaggagcctcacatgctgttcgatcgcatccgcttggtggtgaccaagggtttttcagggacccctggctccaatgagaattctacccagaatgtgtataagattcctcctaccaccactaaggccttgtgcccactctataccagccccagaactgtgacccaagctccacccaagtcaactgccgatgtctccactcctgactctgaaatcaaccttacaaatgtgacagatatcatcagggttccggtgttcaacattgtcattctcctggctggtggattcctgagtaagagcctggtcttctctgtcctgtttgctgtcacgctgaggtcatttgtaccctaggcccacgaacccacgagaatgtcctctgact

SEQ ID NO: 917 - DNA, 461 bp, homo sapiens
agcccacagtgcctgtacaggaaggtgcctggccatgtcacctggctgctaggccagagccatgccaggctgcgtccctccgagcttgggataaagcaaggggaccttggcgctctcagctttccctgccacatccagcttgttgtcccaatgaaatactgagatgctgggctgtctctcccttccaggaatgctgggcccccagcctggccagacaagaagactgtcaggaagggtcggagtctgtaaaaccagcatacagtttggcttttttcacattgatcatttttatatgaaataaaaagatcctgcatttatggtgtagttctgagtcctgagacttttctgcgtgatggctatgccttgcacacaggtgttggtgatggggctgttgagatgcctgttgaaggtacatcgtttgcaaatgtgagtttcctctcctgtccgtgtttgtttagtac

SEQ ID NO: 918 - DNA, 370 bp, homo sapiens
tactggaacctatgatctgaagagcgtcctgggtcaactgggcatcactaaggtcttcagcaatggggctgacctctccggggtcacagaggaggcacccctgaagctctccaaggccgtgcataaggctgtgctgaccatcgacgagaaagggactgaagctgctggggccatgtttttagaggccatacccatgtctatcccccccgaggtcaagttcaacaaaccctttgtcttcttaatgattgaacaaaataccaagtctcccctcttcatgggaaaagtggtgaatcccacccaaaaataactgcctctcgctcctcaacccctcccctccatccctggccccctccctggatgacattaaaga

SEQ ID NO: 919 - DNA, 491 bp, homo sapiens
agctgtacccagagagtcctgtgctgaatgtggactcaatccctagggctggcagaaagggaacagaaaggtttttgagtacggctatagcctggactttcctgttgtctacaccaatgcccaactgcctgccttagggtagtgctaagaggatctcctgtccatcagccaggacagtcagctctctcctttcagggccaatccccagcccttttgttgagccaggcctctctcacctctcctactcacttaaagcccgcctgacagaaaccacggccacatttggttctaagaaaccctctgtcattcgctcccacattctgatgagcaaccgcttccctatttatttatttatttgtttgtttgttttattcattggtctaatttattcaaagggggcaagaagtagcagtgtctgtaaaagagcctagtttttaatagctatggaatcaattcaatttggactggtgtgctctctttaaatcaagtcc

SEQ ID NO: 920 - DNA, 229 bp, homo sapiens
cccacaacccgccaggatttaatcttttatggatttttttttcagtttatagtttccaggaggaaagtcttgtaacgctttactttttctcttctttttttaaagtaaagtgagtgtcagtagatgtgttttttacagtctggattttaaaaaaagtggggcaggagagagggaaccagggaaagggctgtttagaaatacagtttgtggctctgagcgatgccaccgg

SEQ ID NO: 921 - DNA, 465 bp, homo sapiens
ttcctcaccctaaaactaagcgtgctgcttctgcaaaagatttttgtagatgagctgtgtgcctcagaattgctatttcaaattgccaaaaatttagagatgttttctacatatttctgctcttctgaacaacttctgctacccactaaataaaaacacagaaataattagacaattgtctattataacatgacaaccctattaatcatttggtcttctaaaatgggatcatgcccatttagattttccttactatcagtttatttttataacattaacttttactttgttatttattattttatataatggtgagtttttaaattattgctcactgcctatttaatgtagctaataaagttatagaagcagatgatctgttaatttcctatctaataaatgcctttaattgttctcataatgaagaataagtaggtaccctccatgcccttctgtaataaatat

SEQ ID NO: 922 - DNA, 445 bp, homo sapiens
gaaggagacggtctggcggcttgaagaatttggacgatttgccagctttgaggctcaaggtgcattggccaacatagctgtggacaaagccaacttggaaatcatgacaaagcgctccaactatactccgatcaccaatgacaagttcaccccaccagtggtcaatgtcacgtggcttcgaaatggaaaacctgtcaccacaggagtgtcagagacagtcttcctgcccagggaagaccaccttttccgcaagttccactatctccccttcctgccctcaactgaggacgtttacgactgcagggtggagcactggggcttggatgagcctcttctcaagcactgggagtttgatgctccaagccctctcccagagactacagagaacgtggtgtgtgccctgggcctgactgtgggtctggtgggcatcattattgggaccatc

SEQ ID NO: 923 - DNA, 344 bp, homo sapiens
gggccccagattttgcacagagtctctctgaacatactgcccccagaggaagaagaagagacccataagattggcagtctggctgagaacgcattctcagaccctgcaggcagtgccaaccctttggaacccagccaggatgagaagagcatccccttgatctggggtgctgtgctcctggtaggtctgctggtggcagcggtggtgctgtttgctgtgatggccaagaggaaacaagaatccctcctcagtggtccaccacgtcagtgactctggaccggctgctgaattgcctttggatgtaccacacattaggcttgactcaccaccttcatttgacaata

SEQ ID NO: 924 - DNA, 444 bp, homo sapiens
gacatggaatcagggcagccaagcttgagtttttattttttatttatttatttttttgagatagggtctcactttgttacccagcctagaatcttgtataatatgtaattgtagggaaactgctctcataggaaagttttctgctttttaaatacaaaaatacataaaaatacataaaatctgatgatgaatataaaaaagtaaccaacctcattggaacaagtattaacattttggaatatgttttattagttttgtgatgtactgttttacaatttttaccatttttttcagtaattactgtaaaatggtattattggaatgaaactatatttcctcatgtgctgatttgtcttatttttttcatactttcccactggtgctatttttatttccaatggatatttctgtattactagggaggcatttacagtcctctaatgt

SEQ ID NO: 925 - DNA, 529 bp, homo sapiens
gcctgacgccgagtactggaacagccagaaggaagtcctggagaggacccgggcggagttggacacggtgtgcagacacaactaccagttggagctccgcacgaccttgcagcggcgagtggagcccacagtgaccatctccccatccaggacagaggccctcaaccaccacaacctgctggtctgctcagtgacagatttctatccagcccagatcaaagtccggtggtttcggaatgaccaggaggagacaaccggcgttgtgtccaccccccttattaggaacggtgactggaccttccagatcctggtgatgctggaaatgactccccagcatggagacgtctacacctgccacgtggagcaccccagcctccagaaccccatcaccgtggagtggcgggctcagtctgaatctgcccagagcaagatgctgagtggcattggaggcttcgtgctggggctcatcttcctcgggctgggccttattatccatcacaggagtcagaaagggctcctgcactgactc

SEQ ID NO: 926 - DNA, 445 bp, homo sapiens
atcgcccctgagatcctacagggcctgaagtacacattctctgtggactggtggtctttcggggtccttctgtacgagatgctcattggccagtcccccttccatggtgatgatgaggatgaactcttcgagtccatccgtgtggacacgccacattatccccgctggatcaccaaggagtccaaggacatcctggagaagctctttgaaagggaaccaaccaagaggctgggaatgacgggaaacatcaaaatccaccccttcttcaagaccataaactggactctgctggaaaagcggaggttggagccacccttcaggcccaaagtgaagtcacccagagactacagtaactttgaccaggagttcctgaacgagaaggcgcgcctctcctacagcgacaagaacctcatcgactccatggaccagtctgcattcgctggct

SEQ ID NO: 927 - DNA, 551 bp, homo sapiens
cagggccatgaactttgtccggtggaaggccttctttctagagagggaattctcttggctggcttccttaccgtgggcactgaaggctttcagggcctccagccctctcactgtgtccctctctctggaaaggaggaaggagcctatggcatcttccccaacgaaaagcacatccaggcaatggcctaaacttcagagggggcgaaggggtcagccctgcccttcagcatcctcagttcctgcagcagagcctggaagacaccctaatgtggcagctgtctcaaacctccaaaagccctgagtttcaagtatccttgttgacacggccatgaccactttccccgtgggccatggcaatttttacacaaacctgaaaagatgttgtgtcttgtgtttttgtcttatttttgttggagccactctgttcctggctcagcctcaaatgcagtatttttgttgtgttctgttgtttttatagcagggttggggtggtttttgagccatgcgtgggtggggagggaggtgtttaacggcactgtggccttggtcta

SEQ ID NO: 928 - DNA, 116 bp, homo sapiens
cagggcatggaggtgagatacagagtgggtacaggatgctgaagggcccctaaaaattcgcagttgcactcctgcagtattctgagatgtctggagctcagttacgattccctttt

SEQ ID NO: 929 - DNA, 431 bp, homo sapiens
gaaaagccgttcaccaaatcgaccagcttcagcgagagcagcgacacctgaagaggcagctggagaagctgggcattgagaggatccggatggacagcatcggctccaccgtctcctcggagcgctccgactccgacagggaagaaatcgacgttgacgtggagagcacggactatctcacaggtgatctggactggagcagcagcagtgtgagcgactctgacgagcggggcagcatgcagagcctcggcagtgatgagggctattccagcaccagcatcaagagaataaagctgcaggacagtcacaaggcgtgtcttggtctctaagagagtgggcactgcggctgtctccttgaaggttctccctgttggttctgattaggtaacgtattggacctgcccacaactcccttgcacgtaaacttcagt

SEQ ID NO: 930 - DNA, 454 bp, homo sapiens
tgtcaccacgtgcagtatctcaagatattcaggtggccagaagagcttgtcagcaagaggaggaacagaattctcccagcgttaacacaaaatccatgggcagcatgatggcaggtcctctgttgcaaactcagttccaaagtcacaggaagaaagcagaaagttcaacttccaaagggttaggactctccactcaatgtcttaggtcaggagttgtgtctaggctggaagagccaaagaaatattccattttcctttccttgtggttgaaaccacagtcagtggagagatgtttggaacacagtcagtggagctggtggtaccaggtttagcattattggatgtcaaaagcattttttttgtcatgtagctgttttaagaaatctggcccagggtgtttgcagctgtgagaagtcactcacactggccacaaggacgctggctactgtctatt

SEQ ID NO: 931 - DNA, 55 bp, homo sapiens
atagcggtggtttaaacagaggtgcaaacagcaagcggatcttgtcgcctttggg

SEQ ID NO: 932 - DNA, 511 bp, homo sapiens
gagcagttctcacgttgaggtctgtggaagagatgtccattggagaaatggctggtagttactcttttttccccccacccccttaatcagactttaaaagtgcttaaccccttaaacttgttattttttacttgaagcattttgggatggtcttaacagggaagagagagggtgggggagaaaatgtttttttctaagattttccacagatgctatagtactattgacaaactgggttagagaaggagtgtaccgctgtgctgttggcacgaacaccttcagggactggagctgcttttatccttggaagagtattcccagttgaagctgaaaagtacagcacagtgcagctttggttcatattcagtcatctcaggagaacttcagaagagcttgagtaggccaaatgttgaagttaagttttccaataatgtgacttcttaaaagttttattaaaggggaggggcaaatattggcaattagttggcagtggcctgttacggttgggatt

SEQ ID NO: 933 - DNA, 192 bp, homo sapiens
  misc_feature (69)..(69): n is a, c, g, or t
  misc_feature (97)..(97): n is a, c, g, or t
  misc_feature (167)..(167): n is a, c, g, or t
ggtctgagtggtttttccttcttgatggctcaatgacagagactagctcgtaaactccggggcgtttcngggctgttcgctcctgcttggcaatgtngcgagaaaggttttcgcctcctgtttcagcggtgacggctcttgggttttctcggggtggctttttaatnttagtcttggcgcgaggcgggggat

SEQ ID NO: 934 - DNA, 546 bp, homo sapiens
tactggagttcttcatcacacttgccttcctcttcctctatgccacccagtactaccagcgcttcgaccgaattaactggccctgtctggacttcctgcgctgtgtcagtgccatcatcatcttcctggtggtctcctttgcagctgtgacctcccgggacggagctgccattgctgcttttgtttttggcatcatcctggtttccatctttgcctatgatgccttcaagatctaccggactgagatggcacccggggccagccagggggaccagcagtgactctggggctacctggctcctaggcccagccagccagagaggacagtggagcccagacacgtctccttgggattcactagcccccagcccgccaaaccccaccccagccctacacagcagtctggcctgagacgtcactggggacttatctgtggagcctggtgctccaggatgtggcttctcatgaagctctggccagaggaggggaacttattgggggagggggggtggaggggaggaatctggacctctaagtcattcccaa

SEQ ID NO: 935 - DNA, 479 bp, homo sapiens
  misc_feature (79)..(79): n is a, c, g, or t
tccaggccagagccaacgggctgaagtcttgtgtcattgtgatccgggtcttgagggacctgtgcactcgcgtgcccancctggggtcccctccgaggctggcctctcgagctcctgtgtgagaaatccattggcacggccaacagaccgatgggtgctggcgaggccctgcggagagtgctggagtgcctggcgtcgggcatcgtgatgccagatggttctggcatttatgacccttgtgaaaaagaagccactgatgctattgggcatctagacagacagcaacgggaagatatcacacagagtgcgcagcacgcactgcggctcgctgccttcggccagctccataaagtcctaggcatggaccctctgccttccaagatgcccaagaaaccaaagaatgaaaacccagtggactacaccgttcagatcccaccaagcaccacctatgccattacgcccatgaaacgcccaatgga

SEQ ID NO: 936 - DNA, 440 bp, homo sapiens
aagcgagaacgctttcattacttgccagagcaaaactgctatggttttaaactcaacacacacattattcacatcctattggtatactggtatgttgacttgggaatacgtcaggtttacacggcagttcagaatagtaaatatttggaagtttacaaactcttgcttccttaaaggtcagaacatcaggccaaagtacaacgtttaatttcagaacttgccttccaatttacgcattttcaatttgctctccccatttgttgagtcagaagaagcagcattgcccagaaacaggtattacgtaacatgcacatactctaaaaagtactcatcccttgttttctgctcatttcttccagcctgaggaacagacgtcagaaaaaaagcaaccacccagacaacttccccttttagctgagctgtcttctgaccaatcaaca

SEQ ID NO: 937 - DNA, 242 bp, homo sapiens
cctagtgtgcagaggggacggccgcccctcctcggacagccagctgcacccgcccacccagcggcgacattgtacagactcctctcacctctagatagcaaatagctctcagatggtaaacgtagtcgtttgatcccaaaactaccttggcaggtagttttaactctgatcctaacttaactcaatagccatagattttgtatacgttgtgcacaaaatccaaccagagcgcaagggctctc

SEQ ID NO: 938 - DNA, 254 bp, homo sapiens
ctaaccaggtgtgacggcttgcgtctgtactatcatttactcggtaggctgaggtggtaggatagcttaaactctcgggctagagactgcaggaacatgtgaatacgctagtgcaattccagcctgggcaacactggaaagggtaggaagagtagtctttgggtccctaaagatcacctgataacaagtttgacttttctgagcactcttgtggagtttgttgtggagggaataccatgggcattggcaatgta

SEQ ID NO: 939 - DNA, 249 bp, homo sapiens
gtgtgaaggtgggctcacggctgactctctgtgcccagggctgtgctgccatcctggatacaggcacacctgtcatcgtaggacccactgaggagatccgggccctgcatgcagccattgggggaatccccttgctggctggggagtacatcatccggtgctcagaaatcccaaagctccccgcagtctcactcctcattgggggggtctggtttaatctcacggcccaggattacgtcatccagtttg

SEQ ID NO: 940 - DNA, 473 bp, homo sapiens
tcaagtgcgttctttagaccaatgcattgcgtttctttccctgcttttgagatagtaggaagagttcttggtggtgtccccccccttcaattcttcagttgtatagtagttatagggaagatatgggtgtttttctttattattacttttttttttctgcaggtcagtaaaaggatttaagttgcactgacaaaaataccaaaataaaagtgtatttttaagttcccatttgaaattgctggcgctgctggccggatgcatttttgagtttgtattagttgataaattaacagtaataacaagattgtatgaaccgcatggtgcttgcagttttaaatattgtggatatttgtcctgcatcagaaacgagctttggtttttacagattcaactgtgttgaaatcaaacctgccgcaacagaaattgtttttatttcatgtaaaataagggatcaatttcaaaccctgcttatg

SEQ ID NO: 941 - DNA, 491 bp, homo sapiens
tgtggccgcctctaaagagcgtagcggagtttctctggctgctctgaaaaaagcgttggctgccgccggctatgatgtggagaaaaacaacagccgtatcaaacttggtctcaagagcctggtgagcaagggcactctggtgcaaacgaaaggcaccggtgcttctggctcctttaaactcaacaagaaggcagcctccggggaagccaagcccaaggttaaaaaggcgggcggaaccaaacctaagaagccagttggggcagccaagaagcccaagaaggcggctggcggcgcaactccgaagaagagcgctaagaaaacaccgaagaaagcgaagaagccggccgcggccactgtaaccaagaaagtggctaagagcccaaagaaggccaaggttgcgaagcccaagaaagctgccaaaagtgctgctaaggctgtgaagcccaaggccgctaagcccaaggttgtcaagcctaagaaggcggcgccca

SEQ ID NO: 942 - DNA, 511 bp, homo sapiens
atgagatgtatcttttgctctctcttgctctcttatttgtaccggtttttgtatataaaattcatgtttccaatctctctctccctgatcggtgacagtcactagcttatcttgaacagatatttaattttgctaacactcagctctgccctccccgatcccctggctccccagcacacattcctttgaaagagggtttcaatatacatctacatactatatatatattgggcaacttgtatttgtgtgtatatatatatatatatgtttatgtatatatgtgatcctgaaaaaataaacatcgctattctgttttttatatgttcaaaccaaacaagaaaaaatagagaattctacatactaaatctctctccttttttaattttaatatttgttatcatttatttattggtgctactgtttatccgtaataattgtggggaaaagatattaacatcacgtctttgtctctagtgcagtttttcgagatattccgtagtacatatttatt

SEQ ID NO: 943 - DNA, 301 bp, homo sapiens
  misc_feature (164)..(164): n is a, c, g, or t
ctggcagtaggggtggggtaggtgactctcgctagatccctccaaagcagaccggtggcgatgtcagcggatgtcacgagctcgttagctgcgttcggggaaggttggggcgtcagggagctctcggatcacagcagcccccgccctctcctaggcctggcccngcagagcccccagagtggaccccccagcgactggggtcttctccccactcctccctccttctggtctgatgcggcagcgcgggggctgcggggcctgtttgggacgaacagagctctcccttggtaagacttatttt

SEQ ID NO: 944 - DNA, 577 bp, homo sapiens
gacagcctgagacagttcttacggaaacaccccaggacacaattgaattaaacagattgaatttagaatcttccaattcaaagtactccttgaatacagattcctcagtgtcttatattgattcagctgtaatttcacctgatactgtcccactgggaacaggaacttccatattatctaaacaggttcaaaataaaccaaaaactggtcgaagtttattaggaggaccagcagctcttagtccattaaccccaagttttgggattttgccattagaaaccccaagtcctggagatggatcctatttacaaaactacactaatacacctcctgtaattgatgtgccatccaccggagccccttcaaaaaagtctgttgccagaatcggccaaactggaacaaagtctgtcttctcacagagtggaaatagccgagaggtaactccaattcttgcacaaacacaaagttctggtccacaaacaagtacaacacctcaggtattgagccccactattacatctcccccaaacgcactgcctcgaagaagttcacgactctttactagtgacagctccac

SEQ ID NO: 945 - DNA, 317 bp, homo sapiens
cgccatcaccgagcgcttgatgtgcgcggagagcaatcgccgggacagctgcaagggtgactccgggggcccgctggtgtgcgggggcgtgctcgagggcgtggtcacctcgggctcgcgcgtttgcggcaaccgcaagaagcccgggatctacacccgcgtggcgagctatgcggcctggatcgacagcgtcctggcctagggtgccggggcctgaaggtcagggtcacccaagcaacaaagtcccgagcaatgaagtcatccactcctgcatctggttggtctttattgagcacctactatatgcagaaggggag

SEQ ID NO: 946 - DNA, 101 bp, homo sapiens
cgatcaccaatgtacctccagaggtaactgtgctcacgaacagccctgtggaactgagagagcccaacgtcctcatctgtttcatagacaagttcacccca

SEQ ID NO: 947 - DNA, 156 bp, homo sapiens
ggagcatatcaagtaagaggcgtcgccaccaccctcccgagggcccctctgcggatggagccccaggtgcaacagggcccatggtcatctgtggagggacagcccgtgtggaaactgcatttatcttcttgacctgatacccatgcagtaaatgaa

SEQ ID NO: 948 - DNA, 321 bp, homo sapiens
  misc_feature (145)..(145): n is a, c, g, or t
gaaagaggagcttttcttccaggcatgttccagtttcaccctaagactgaccttcaaataatcaggttgtactgaaataaaggacttgttaaaaattaaaattatgtcatcgagatgatagcttttttcctcctccaacagtttnttgtcatgtgttgtgggagagctcgagtgaagagcaataaactccaggtcttataagaatgtacatacaataaaggtggtgccagcagtttttttttttctaaagagtcacatgtagaaaagcctccagtattaagctcctgaattcattccttaaataaattggctctctctctc

SEQ ID NO: 949 - DNA, 364 bp, homo sapiens
gtacccagttaaattttcatttcagataaacaacaaataattttttagtataagtacattattgtttatctgaaagttttaattgaactaacaatcctagtttgatactcccagtcttgtcattgccagctgtgttggtagtgctgtgttgaattacggaataatgagttagaactattaaaacagccaaaactccacagtcaatattagtaatttcttgctggttgaaacttgtttattatgtacaaatagattcttataatattatttaaatgactgcatttttaaatacaaggctttatatttttaactttaagatgtttttatgtgctctccaaattttttttactgtttctgattgtat

SEQ ID NO: 950 - DNA, 300 bp, homo sapiens
  misc_feature (98)..(98): n is a, c, g, or t
gttatgacatacttggagcggcatgatttcaagaagccattccaaattcttatagctccttagctctggttttactctcgtattttccccaagaaaantttttggctattcaaagaaagcacaaaatatgtgatgtggaactcatgaaaatagggacttttgatatctctttaaatattccctgactcacggaaaagatgtcctcttttggtgtatacattgtgaaaatctacccatttatctctctctctctcttttcttttaaataaattatctgataaggccggcaaggtggctcac

SEQ ID NO: 951 - DNA, 224 bp, homo sapiens
gaagcgtttaggcatgtttaacatccagcactgtaagaagctgtccagctgggtactgctaatgaaatacctgggcaatgccaccgccatcttcttcctacctgatgaggggaaactacagcacctggaaaatgaactcacccacgatatcatcaccaagttcctggaaaatgaagacagaaggtctgccagcttacatttacccaaactgtccattactggaa

SEQ ID NO: 952 - DNA, 398 bp, homo sapiens
ctgtgtatccttcaaagacccagcccctgcagcaccataacctcctggtctgttctgtgagtggtttctatccaggcagcattgaagtcaggtggttccggaatggccaggaagagaagactggggtggtgtccacaggcctgatccacaatggagactggaccttccagaccctggtgatgctggaaacagttcctcggagtggagaggtttacacctgccaagtggagcacccaagcgtgacaagccctctcacagtggaatggagagcacggtctgaatctgcacagagcaagatgctgagtggagtcgggggctttgtgctgggcctgctcttccttggggccgggctgttcatctacttcaggaatcagaaaggacactctggacttcagcca

SEQ ID NO: 953 - DNA, 418 bp, homo sapiens
gagggcaaccaccagtttgctaagtacaaatcattcaaggtggctgacgaggcagagaagtacaagctggtactgggagcctttgtcgggggcagtgcgggtaattctctaacgggccacaacaacaacttcttctccaccaaagaccaagacaatgatgtgagttcttcgaattgtgctgagaagttccagggagcctggtggtacgccgactgtcatgcttcaaacctcaatggtctctacctcatgggaccccatgagagctatgccaatggtatcaactggagtgcggcgaaggggtacaaatatagctacaaggtgtcagagatgaaggtgcggcccgcctagacgggccaggacccctccacatgcacctgctagtggggaggccacacccacaagcgctgcgtcgtggaag

SEQ ID NO: 954 - DNA, 160 bp, homo sapiens
gcactcacgaaccgaaaaaccaaagctatatggtaagaggctgtgcaaccgcctcaatgtgccaacatgcccacctgggtgacgccttcagcatgaaccacattgatgtctcctgctgtactaaaagtggctgtaaccacccagacctggatgtccagta

SEQ ID NO: 955 - DNA, 484 bp, homo sapiens
ggttgaatgtttgtccttaggataggcctatgtgctagcccacaaagaatattgtctcattagcctgaatgtgccataagactgaccttttaaaatgttttgagggatctgtggatgcttcgttaatttgttcagccacaatttattgagaaaatattctgtgtcaagcactgtgggttttaatatttttaaatcaaacgctgattacagataatagtatttatataaataattgaaaaaaattttcttttgggaagagggagaaaatgaaataaatatcattaaagataactcaggagaatcttctttacaattttacgtttagaatgtttaaggttaagaaagaaatagtcaatatgcttgtataaaacactgttcactgttttttttaaaaaaaaaacttgatttgttattaacattgatctgctgacaaaacctgggaatttgggttgtgtatgcgaatgtttcagtgcctcagacaaat

SEQ ID NO: 956 - DNA, 448 bp, homo sapiens
  misc_feature (28)..(28): n is a, c, g, or t
  misc_feature (40)..(40): n is a, c, g, or t
  misc_feature (49)..(50): n is a, c, g, or t
  misc_feature (86)..(87): n is a, c, g, or t
  misc_feature (99)..(99): n is a, c, g, or t
  misc_feature (121)..(121): n is a, c, g, or t
  misc_feature (139)..(139): n is a, c, g, or t
  misc_feature (168)..(168): n is a, c, g, or t
  misc_feature (180)..(180): n is a, c, g, or t
  misc_feature (212)..(212): n is a, c, g, or t
  misc_feature (226)..(226): n is a, c, g, or t
  misc_feature (232)..(232): n is a, c, g, or t
  misc_feature (236)..(236): n is a, c, g, or t
  misc_feature (248)..(248): n is a, c, g, or t
  misc_feature (255)..(255): n is a, c, g, or t
  misc_feature (266)..(266): n is a, c, g, or t
  misc_feature (314)..(314): n is a, c, g, or t
  misc_feature (369)..(369): n is a, c, g, or t
  misc_feature (371)..(371): n is a, c, g, or t
  misc_feature (398)..(398): n is a, c, g, or t
gccgagtactggaacagccagaaggacntcctggaagacnagcgggccnnggtggacacctactgcagacacaactacggggttgnngagagcttcacngtgcagcggcgagtccatcctnaggtgactgtgtatcctncaaagacccagcccctgcagcaccacaanctcctggtctgntctgtgagtggtttctatccaggcagcattgnaagtcaggtggttncggaanggcnaggaagagaagnctggggntggtgtccacnggcctgatccagaatggagactggaccttccagaccctggtgatgctngaaacagttcctcggagtggagaggtttacacctgccaagtggagcacccaagcntnacgagccctctcacagtggaatggagngcacggtctgaatctgcacagagcaagatgctgagtggagtcgggggctt

SEQ ID NO: 957 - DNA, 395 bp, homo sapiens
tgatagcgagtgattctcaccgtcctgaagtcaaactcaaaatggcacctgttcctcttgatgattctaacagacctgcttccttgactaaagacaggctgcttgctagtacacttgtccattctgtcaagaaggagcaagaattccgatccatctttgaccacattaagttgccacaggccagcaaaagcacttcagagtcatttattcaacacattgtgtccttggttcatcatgttaaagagcaatacttcaagtcagctgcaatgaccctaaacgagcggttcacttcgtatcagaaagccactgaagaacatagtactcggcaaaagagccctgaaatacacaggagaattgacatctcaccaagtaccctgaggaagcatacccgttta

SEQ ID NO: 958 - DNA, 458 bp, homo sapiens
cgctgccgtggatacttagttcgacaggaattccgatccaggatgaatttcctgaagaaacaaatccctgccatcacctgcattcagtcacagtggagaggatacaagcagaagaaggcatatcaagatcggttagcttacctgcgctcccacaaagatgaagttgtaaagattcagtccctggcaaggatgcaccaagctcgaaagcgctatcgagatcgcctgcagtacttccgggaccatataaatgacattatcaaaatccaggcttttattcgggcaaacaaagctcgggatgactacaagactctcatcaatgctgaggatcctcctatggttgtggtccgaaaatttgtccacctgctggaccaaagtgaccaggattttcaggaggagcttgaccttatgaagatgcgggaagaggttatcaccctcattcgttctaaccagcagctgga

SEQ ID NO: 959 - DNA, 295 bp, homo sapiens
  misc_feature (114)..(114): n is a, c, g, or t
  misc_feature (224)..(224): n is a, c, g, or t
accaatgaggttcctgaggtcacagtgttttccaagtctcccgtgacactgggtcagcccaacaccctcatctgtcttgtggacaacatctttcctcctgtggtcaacatcacntggctgagcaatgggcactcagtcacagaaggtgtttctgagaccagcttcctctccaagagtgatcattccttcttcaagatcagttacctcaccttcctcccttctgntgatgagatttatgactgcaaggtggagcactggggcctggatgagcctcttctgaaacactgggagcctg

SEQ ID NO: 960 - DNA, 362 bp, homo sapiens
tgtccagtaccgcagtggggctgctcctcagcctggccctgcccatctcagcctcaccatcaccctgctaatgactgccagactgtggggaggcactctcctctggacctaaacctgaaatccccctctctgccctggctggatccgggggacccctttgcccttccctcggctcccagccctacagacttgctgtgtgacctcaggccagtgtgccgacctctctgggcctcagttttcccagctatgaaaacagctatctcacaaagttgtgtgaagcagaagagaaaagctggaggaaggccgtgggcaatgggagagctcttgttattattaatattgttgccgctgttgtgttgttg

SEQ ID NO: 961 - DNA, 484 bp, homo sapiens
ccccatggacgccagcgtggaggaggagggtgtgcggcgtgcactggactttgccgtcggcgagtacaacaaagccagcaacgacatgtaccacagccgcgcgctgcaggtggtgcgcgcccgcaagcagatcgtagctggggtgaactacttcttggacgtggagctgggccgaaccacgtgtaccaagacccagcccaacttggacaactgccccttccatgaccagccacatctgaaaaggaaagcattctgctctttccagatctacgctgtgccttggcagggcacaatgaccttgtcgaaatccacctgtcaggacgcctaggggtctgtaccgggctggcctgtgcctatcacctcttatgcacacctcccaccccctgtattcccacccctggactggtggcccctgccttggggaaggtctccccatgtgcctgcaccaggagacagacagagaaggcagcaggcggcctttgtt

SEQ ID NO: 962 - DNA, 425 bp, homo sapiens
gagctccgcacgggatttgcagatttacagaatggctgcacattaatggaaagagaagcataaacctatcttctttcattatggagggaggtttggcagatggagaacctgatcgaacttcgcttcttggtgatagcaaagatgtccttgggccatcaactgttgtagcaaacagtgacgaatctcagcttctgacaccaggaaagatgagtcagcgccaaggaaaagaagcttatccaacgccaaccaaagatttgcatcagccatctcttagtccagcaagtcctcatagccagggttttgaaagagggaaggaagatatttctcaaaataaagatgaatcttcactttctatgtcaaagagcaagtctgaatctaaactttataatggctcagagaaggacagttcaacttcaagcaaactc

SEQ ID NO: 963 - DNA, 234 bp, homo sapiens
  misc_feature (81)..(82): n is a, c, g, or t
ggatgatctcaagggcacctttgcccagctgagtgaactgcactgtgacaagctgcatgtggatcctgagaacttcaagcnncctgggaaatgtgctggtgaccgttttggcaatccatttcggcaaagaattcacccctgaggtgcaggcttcctggcagaagatggtgactggagtggccagtgccctgtcctccagataccactgagctcactgcccatgatgcagagctt

SEQ ID NO: 964 - DNA, 503 bp, homo sapiens
  misc_feature (419)..(419): n is a, c, g, or t
gtgctcggcctgatggagactgtgtgcagccccttcacggccgccagacgtctgcgggaccaggaggcagccgtggcggagctgcaggccgccctggagcgacaggctctccagaagcaagccctgcaggagaaaggcaagcagcaggacacggtcctcggcggccgggccctgtccaaccggcagcacgcctcctaggaactgtgggagaccagcggagtgggagggagacgcagtagacagagacagaccgagaaggaagggagagacagagggggcgcgcgcacaggagcctgactccgctgggagagtgcaggagcacgtgctgttttttatttggacttaacttcagagaaaccgctgacatctagaactgacctaccacaagcatccaccaaaggagtttgggattgagtttntgctgctgtgcagcactgcattgtcatgacatttccaacactgtgtgaattatctaaatgcgtctaccattttgcactagggag

SEQ ID NO: 965 - DNA, 449 bp, homo sapiens
taaagactatcggcctccgggaagtgtggtactttggcctccactatgtggataataaaggatttcctacctggctgaagctggataagaaggtgtctgcccaggaggtcaggaaggagaatcccctccagttcaagttccgggccaagttctaccctgaagatgtggctgaggagctcatccaggacatcacccagaaacttttcttcctccaagtgaaggaaggaatccttagcgatgagatctactgcccccctgagactgccgtgctcttggggtcctacgctgtgcaggccaagtttggggactacaacaaagaagtgcacaagtctgggtacctcagctctgagcggctgatccctcaaagagtgatggaccagcacaaacttaccagggaccagtgggaggaccggatccaggtgtggcatgcggaacaccgtgggatgctc

SEQ ID NO: 966 - DNA, 462 bp, homo sapiens
ggtccccacagactcagagagaacccaccatggtgctgtctcctgccgacaagaccaacgtcaaggccgcctggggtaaggtcggcgcgcacgctggcgagtatggtgcggaggccctggagaggatgttcctgtccttccccaccaccaagacctacttcccgcacttcgacctgagccacggctctgcccaggttaagggccacggcaagaaggtggccgacgccctgaccaacgccgtggcgcacgtggacgacatgcccaacgcgctgtccgccctgagcgacctgcacgcgcacaagcttcgggtggacccggtcaacttcaagctcctaagccactgcctgctggtgaccctggccgcccacctccccgccgagttcacccctgcggtgcacgcctccctggacaagttcctggcttctgtgagcaccgtgctgacctccaaataccgttaagctg

SEQ ID NO: 967 - DNA, 445 bp, homo sapiens
agagaacccaccatggtgctgtctcctgacgacaagaccaacgtcaaggccgcctggggtaaggtcggcgcgcacgctggcgagtatggtgcggaggccctggagaggatgttcctgtccttccccaccaccaagacctacttcccgcacttcgacctgagccacggctctgcccaggttaagggccacggcaagaaggtggccgacgcgctgaccaacgccgtggcgcacgtggacgacatgcccaacgcgctgtccgccctgagcgacctgcacgcgcacaagcttcgggtggacccggtcaacttcaagctcctaagccactgcctgctggtgaccctggccgcccacctccccgccgagttcacccctgcggtgcacgcctccctggacaagttcctggcttctgtgagcaccgtgctgacctccaaataccgttaagctg

SEQ ID NO: 968 - DNA, 434 bp, homo sapiens
ggtccccacagactcagagagaacccaccatggtgctgtctcctgccgacaagaccaacgtcaaggccgcctggggtaaggtcggcgcgcacgctggcgagtatggtgcggaggccctggagaggcacttcgacctgagccacggctctgcccaagttaagggccacggcaagaaggtggccgacgcgctgaccaacgccgtggcgcacgtggacgacatgcccaacgcgctgtccgccctgagcgacctgcacgcgcacaagcttcgggtggacccggtcaacttcaagctaagccactgcctgctggtgaccctggccgcccacctccccgccgagttcacccctgcggtgcacgcttccctggacaagttcctggcttctgtgagcaccgtgctgacctccaaataccgttaagctggagcctcggtagcc

SEQ ID NO: 969 - DNA, 446 bp, homo sapiens
cttgcttcggctgctaaactgaatttttgttacttagaatattataaagtgtggatgctttctataatgctattggtctaagtgtgattaaatttcattaaggtgtataagcctctaattattacataactggcacgtctgacttttgctatcatttgaggattctactgtatataagtttcatctaacattggcattaataaccacaggtatattccaactaattgttacttcttgtaattgccagactacttcaagagttctcgtaagttttagattttcagagacccatcttcaatactttgaactcattctggtaaacttccttctacctatgtgcaggtccctgtactccagccaacacaggctcagtaactggaaatgaattggctaaaatggtagcaccattgggtttcttaatggagctttaggagttctttatggaa

SEQ ID NO: 970 - DNA, 434 bp, homo sapiens
tgaggagaagtctgccgttactgccctgtggggcaaggtgaacgtggatgaagttggtggtgaggccctgggcaggctgctggtggtctacccttggacccagaggttctttgagtcctttggggatctgtccactcctgatgctgttatgggcaaccctaaggtgaaggctcatggcaagaaagtgctcggttctttgagtcctttggggatctgtccactcctgatgctgttatgggcaaccctaaggtgaaggctcatggcaagaaagtgctcggtgcctttagtgatggcctggctcacctggacaacctcaagggcacctttgccacactgagtgagctgcactgtgacaagctgcacgtggatcctgagaacttcaggctcctgggcaacgtgctggtctgtgtgctggcccatcactttggcaaaga

SEQ ID NO: 971 - DNA, 445 bp, homo sapiens
agagaacccaccatggtgctgtctcctgccgacaagaccaacgtcaaggccgcctggggtaaggtcggcgcgcacgctggcgagtatggtgcggaggccctggagaggatgttcctgtccttccccaccaccaagacctacttcccgcacttcgacctgagccacggctctgcccaggttaagggccacggcaagaaggtggccgacgcgctgaccaacgccgtggcgcacgtggacgacatgcccaacgcgctgtccgccctgagcgacctgcacgcgcacaagcttcgggtggacccggtcaacttcaagctcctaagccactgcctgctggtgaccctggccgcccacctccccgccgagttcacccctgcggtgcacgcctccctggacaagttcctggcttctgtgagcaccgtgctgacctccaaataccgttaagctg

SEQ ID NO: 972 - DNA, 494 bp, homo sapiens
tgaggagaagtctgccgttactgccctgtggggcaaggtgaacgtggatgaagttggtggtgaggccctgggcaggctgctggtggtctacccttggacccagaggttctttgagtcctttggggatctgtccactcctgatgctgttatgggcaaccctaaggtgaaggctcatggcaagaaagtgctcggtgcctttagtgatggcctggctcacctggacaacctcaagggcacctttgccacactgagtgagctgcactgtgacaagctgcacgtggatcctgagaacttcaggctcctgggcaacgtgctggtctgtgtgccggcccatcactttggcaaagaattcacccaaccagtgcaggctgcctatcagaaagtggtggctggtgtggctaatgccctggcccacaagtatcactaagctcgctttcttgctgtccaatttctattaaaggttcctttgttccctaagtccaactactaaactg

SEQ ID NO: 973 - DNA, 435 bp, homo sapiens
tcctgccgacaagaccaacgtcaaggccgcctggggtaaggtcggcgcgcacgctggcgagtatggtgcggaggccctggagaggatgttcctgtccttccccaccaccaagacctacttcccgcacttcgacctgagccacggctctgcccaggttaagggccacggcaagaaggtggccgacgcgctgaccaacgccgtggcgcacgtggacgacatgcccaacgcgctgtccgccctgagcgacctgcacgcgcacaagcttcgggtggacccggtcaacttcaagctcctaagccactgcctgctggtgaccctggccgcccacctccccgccgagttcacccctgcggtgcacgcctccctggacaagttcctggcttctgtgagcaccgtgctgacctccaaataccgttaagctggagcctcggtggc

SEQ ID NO: 974 - DNA, 220 bp, homo sapiens
  misc_feature (132)..(132): n is a, c, g, or t
  misc_feature (135)..(135): n is a, c, g, or t
  misc_feature (159)..(159): n is a, c, g, or t
  misc_feature (162)..(162): n is a, c, g, or t
  misc_feature (172)..(172): n is a, c, g, or t
  misc_feature (174)..(174): n is a, c, g, or t
  misc_feature (180)..(180): n is a, c, g, or t
gcagttatgggcaaccctaaggtgaaggctcatggcaagaaagtgctcggtgcctttagtgatggcctggctcacctggacaacctcaagggcacctttgccacactgagtgagctgcactgtgacaagctncangtggatcctgagaacttcaggctnctnggcaacgtgntngtctgngtgctggcccatcactttggcaaagaattcaccccaccag

SEQ ID NO: 975 - DNA, 244 bp, homo sapiens
  misc_feature (74)..(74): n is a, c, g, or t
  misc_feature (93)..(93): n is a, c, g, or t
  misc_feature (164)..(169): n is a, c, g, or t
  misc_feature (171)..(172): n is a, c, g, or t
  misc_feature (176)..(176): n is a, c, g, or t
  misc_feature (180)..(181): n is a, c, g, or t
tcaacttcaagctcctaagccactgcctgctggtgaccctggccgcccacctccccgccgagttcaacccctgnggtgcacgcctccctgganaagttcctggcttctgtgagcaccgtgctgacctccaaataccgttaagctggagcctcggtagccgttcnnnnnncnngctnggcnntccaacgggccctcctcccctccttgcaccggcccttcctggtctttgaataaagtctgagtg

SEQ ID NO: 976 - DNA, 193 bp, homo sapiens
aatatacttcgaaagctgctcttcaatgaggaagccatggggaaggtagatgcttcacctcctactaactaaagaagaactgacattggacgagagattggaaatccagtactttggtatccagtccacttccattgatggcattagagatccagcacattctcagtactgtggtgcagtattagcccaaatc

SEQ ID NO: 977 - DNA, 546 bp, homo sapiens
  misc_feature (186)..(187): n is a, c, g, or t
  misc_feature (410)..(410): n is a, c, g, or t
cagaagcatcttcagttttcatatgaaaaacttaagcccaggagtgatttgtgcagccaaggacacacagcaagttagtggctgcaccagaaatagtactcactgcctcagacagtccctcccacagtctactctgtctccaccccaaggtctggttctgaatcattcagttgtcagttgtctccnnttttttttttttttttggagacagggtctctctctgtggcccaggctgaagtgcagtggtgtgattacagctcatgtagcctggacctcccaagctcaagcaatcctcctgcctctgcctcccaagtagctgggaccacaggtgggcagcaccacacctggctaattttttaaatttttttttatagagacagggtcttaccatttgccccagctggtctcanacccctgggctcaagcaagcctcctgccttggcctcccaaagtgctgggattacaggtgtgagccaccacacccggccttatctcctaacattttgatagcacaaaattttgaaaacccacttctgtgtacgttat

SEQ ID NO: 978 - DNA, 276 bp, homo sapiens
ggtcagcttactgtatgattaagtaacacaaggcacagtagccatctttttcattatgttgcaacactgatcacgtgcctcgataaaatggctgattcaacaagatgatggcaacacgaaggggagactttggattgtctatttaaaatctaggtaataagtaagtaattaataaaaactctatcttaagtgcactttcacatgctttttgtttataataaacaaacaacaaacttcctaactttgttgcaataggcttgactaccatttcatttg

SEQ ID NO: 979 - DNA, 454 bp, homo sapiens
  misc_feature (87)..(87): n is a, c, g, or t
aaaccttctacctgaattcagccctcatgagacatcagagagtgcacacaggagagaaaccttacgaatgtaatgaatgtggaaagntattctcccagttgtcatacctcactatccatcatagaactcattcaggagtaaaaccctatgaatgtagtgaatgtgggaaaaccttctaccagaactcagccctttgtagacatcggagaatacacaaaggagagaagccctatgaatgctatatatgtggaaaattcttctctcagatgtcatacctcactatacatcatagaattcattcaggagagaagccctatgaatgtagtgaatgtgggaaaaccttctgccagaattcagcccttaatcgacatcagagaacacacacaggagagaaagcctacgaatgttatgaatgtgggaagtgcttctctcagatgtcctatctcactataca

SEQ ID NO: 980 - DNA, 257 bp, homo sapiens
tggcttcttccattaacgccttttgtctttcctgtatgattttcggtctctttcacttcttgaagatcttttgcctgatcgactactctctgatatagacctctttctgtcggaccgggaattcttatcctttgatccttttgtatctctactactaccaccttttgaagatttgtgacttctttctagtcctgaagtatcccttctcttccgatccacgctccttctgtgctttctatctctattatgtccccggc

SEQ ID NO: 981 - DNA, 338 bp, homo sapiens
agaggctttctcggtatcagcagtttaaagattttcaacgacgaattcttgtggctaccaacctatttggccgaggcatggacatcgagcgggtgaacattgcttttaattatgacatgcctgaggattctgacacctacctgcatcgggtggccagagcaggccggtttggcaccaagggcttggctatcacatttgtgtccgatgagaatgatgccaagatcctcaatgatgtgcaggatcgctttgaggtcaatattagtgagctgcctgatgagatagacatctcctcctacattgaacagacacggtagaagactcgcccattttggaatgtg

SEQ ID NO: 982 - DNA, 505 bp, homo sapiens
cctatcagaatatgtccctcaacccccgaaacaaggcttctctcagcctccccaccagtgatggataacagctcctattctcagctgacctgactgagccaacccatgaactcttcactccttggggaagccacctcccatcacacccctgagcagagttagggaggaattctacttcccataaaaggacctctcctgagaggcaaaacctgttgcctccaccacggcttccctcttggctcattccaagcttggccaaattggggaagtgggatggaggttgccctgcatcccccctcctctgcctgagtgtgtctttgtaatgtcagctggcatcatacaaagagcaggagaagcaaacacccagaactcttttgctggtcagagattccctgagtgtctgtcctcacccaagcctgctctgtgtctgtgttgtgaagcttgagactctggaaagaaatggggagggggggcaggggaaatgttgccctaagaatgcttctca

SEQ ID NO: 983 - DNA, 554 bp, homo sapiens
gttcagattaactgcttatagccttagaaagccttttacaaaattaaaaaaaaaatagatgtgcattcagtttttaagaatggaatcatccaaaggaattcctttttttgaggtttggatgttgcagctagtaaaggatatttttgctctgttcagcagttctaaaaattgctgaagtaggggccaggtcactggtagttatagtatggaatgggagaagtgaaagttcagttatagaactttccatacttccaagtttactgcaagtttttatgcttgagagagatgctttctaatataagactgatgtgttgattttactgattgtactgtacatctattaaagccttagattattacattacgggttggaacccataccaatgtaatttcaatcgtgttaagaaagtaatggtgacttcacatgttattgtagttagttacattatagaatattacttatttttcttgttaaaatgtagtttttcatttcctacatttattagattttcattttctattaacaattgaataccatttcagtttatagactt

SEQ ID NO: 984 - DNA, 499 bp, homo sapiens
gtgtctgcatgagcatgtggcctccccgtcccttccccggtggcgaacccagtgacccagggacacgtggggtgtgctggtgctgctccccagcccaccaatgcctggccagcctgcccccttccctggacagggctgtggagatggctccggcggcttggggaaagcgaaattgccaacactcaagtcacctcagtaccatccaggaggctgggtattgtcctgcctctgccttttctgtctcagcggcagtgcccagagcccacacccccccaagagccctcgatggacaggcctgacccaccccacctggggccagccaggagccccgcctgggccatcagtatttattgcctccgtccgtgccgtccctgggccactggctggcgcctcttcccccagcctctcagtgccaccacccccggcagccttccctgacccagccaggacaaacaagggaccaagtgcacacattgctgagagccgtctcctataggtc

SEQ ID NO: 985 - DNA, 187 bp, homo sapiens
actcgctgtcggaccgcgacagctacctaagcggctccctgagctccggcagcctcagcggctctgagtctcccagcctcgaccctggccgccgcctgccaatcttcagccgcctctccatctccgacgactgaggcaagagggcgccagtgaggaggaagggaaggcggttcagagatgttggagg

SEQ ID NO: 986 - DNA, 495 bp, homo sapiens
tggaggaaaaggtgacttctgcccccaccgctcttacccccactgtagtggcctttggagatgcccccacctcccccccaccaactctcgcgtgttggagagaaggggccctcccagcacaaagttgcattcctccccccctaatttattctaatttattaactttgacccaccctttctgagcctgcagccttcccgtgtggcctgagggctgtcgagtgagctgccccagccccctcccagcccttgcccagcctgggggagtggggaaggcttgggcatggccccgttggaggttgatttgctgttttgtttcttgtctttgtgttctgtggtacttgctgagagaaaagaaaagtgagccaagcagaaggaggtggaaaacggacccaaaccccagtgtgccctgccccatgcctttcctttagtggtgggaaacccttatcttgcaaagtgaatgtgtccccttccccaccctctagtgtatttcacaga

SEQ ID NO: 987 - DNA, 452 bp, homo sapiens
  misc_feature (375)..(375): n is a, c, g, or t
ggctgcttaactgctgtataggacaagccccttacccctctctgggcccatgaattcctggcttggtttatgttctgatttgacacactgattttaatcttcgaatcatgacactgagtgcagaggaggtggcattccgacagcaggacatacatgttggtgtgaagactgggacgacactgggtagaatctagtttttaattattattaatataaaggatcaaattaatttaaatatgattctgaagtctacagaacttttagttctgtgctgtctatgtggacactttggtaaaatgcaaattatgatatggacgttatcattggtctggtgagatgtttcatatttgtgacagttaatttaaaaattatganttaatgctgcctgtgtctatggggttctgtcttctttgatagccatctattcatctggatcatgggaccctctctaa

SEQ ID NO: 988 - DNA, 563 bp, homo sapiens
aggacttcgagttgggttgcagcttatgacatgcatgataggttttggaaggtaacttttaactgcaaacctataaagtactattttttattttataaatgaacagggttttaacgtgctcaactttaatttttttcaattgtatgaaggccttaaaaaagctacattaagcgtagctaaaattatttattggactaaaaactaacagaacttcatttccagaattttttttttttttttttttttggcaaatgtttacattcaattaaggggaaaaagtagaaccagcacaaatgagtggcagttgctggagcataactgcttcaataaatcttcatcttggggtaattacaggcaagtcattttcacatcctcttgaggttcagagcatcagaatgaactctatgaatacatgtgtaagtgccagacagctgaatctttatcaggtattgtaaagatacacatatgatatgtttattaaaattgaaataatgtaaaacacatgaataaatttgcaaaaccaagatcacagtacaccatatgcactctggtaccttaatttt

SEQ ID NO: 989 - DNA, 133 bp, homo sapiens
taccccaacctcatccaggtgaggcagggcaaggtcacccggcaggggaagttcaagcccaacagcgtcacatataggaccaaatcaggcaacatcctgctgcacaagtcgaccattaacagggaggccacac

SEQ ID NO: 990 - DNA, 463 bp, homo sapiens
gccacttgtcttgaaaactgtgcaactttttaaagtaaattattaagcagactggaaaagtgatgtattttcatagtgacctgtgtttcacttaatgtttcttagagccaagtgtcttttaaacattattttttatttctgatttcataattcagaactaaatttttcatagaagtgttgagccatgctacagttagtcttgtcccaattaaaatactatgcagtatctcttacatcagtagcatttttctaaaaccttagtcatcagatatgcttactaaatcttcagcatagaaggaagtgtgtttgcctaaaacaatctaaaacaattcccttctttttcatcccagaccaatggcattattaggtcttaaagtagttactcccttctcgtgtttgcttaaaatatgtgaagttttccttgctatttcaataacagatggtgctgctaattcccaacatt

SEQ ID NO: 991 - DNA, 496 bp, homo sapiens
ttctgcatcgacatgctcaacgccaagctggctgtccaaaagtatgaggagctgttcccagctttctctgattcccgggaatgcaagttgatgaaaaaattgctagaggcccacgaggagcagaatgtggacagctacaccgagtcggtgaaggaatacgactccatctcccggctggaccagtggctcaccaccatgctgctgcgcatcaagaagaccatccagggcgatgaggaggacctgcgctaagccccacccagccccccagtgcccgtcttcgctgtcccatctgctcagagagagccaagctctaaagcacatgtagccgctgagacctgctgtttctgctgggggcaggctcctcttcccccagccccgggaggctcccggagcttcctgcagccccgacctctcaggttagaccctgggccctggagcttagggattctccccaccccagccccacacctgctccttccctaatgctttgaggttt

SEQ ID NO: 992 - DNA, 471 bp, homo sapiens
gaagagggtgtcctcacactgtggcggggctgcatccctaccatggctcgggccgtcgtcgtcaatgctgcccagctcgcctcctactcccaatccaagcagttcttactggactcaggctacttctctgacaacatcctgtgccacttctgtgccagcatgatcagcggtcttgtcaccactgctgcctccatgcctgtggacattgccaagacccgaatccagaacatgcggatgattgatgggaagccggaatacaagaacgggctggacgtgctgttcaaagttgtccgctacgagggcttcttcagcctgtggaagggcttcacgccgtactatgcccgcctgggcccccacaccgtcctcaccttcatcttcttggagcagatgaacaaggcctacaagcgtctcttcctcagtggctgaagcgtttcagggcacacaggacagcagaagatcccctttgtcagt

SEQ ID NO: 993 - DNA, 208 bp, homo sapiens
ttttattcctggtaccactaccacaatttacagggcaatatacctgatgtaatgaaaagaaaaagaaaaagacaaagctacaacagataaaagacctcaggaatgtacatctaattgacactacattgcattaatcaatagctgcactttttgcaaactgtggctatgacagtcctgaacaagaagggtttcctgtttaagctgcagt

SEQ ID NO: 994 - DNA, 403 bp, homo sapiens
gacttccaggtcggacaagccaaggtggtcctgaagagcaaggatgaccaggtgaccgttatcggggctggggtgaccctgcacgaggccttggccgctgccgaactgctgaagaaagaaaagatcaacatccgcgtgctggaccccttcaccatcaagcccctggacagaaaactcattctcgacagcgctcgtgccaccaagggcaggatcctcaccgtggaggaccattattatgaaggtggcattggtgaggctgtgtccagtgcagtagtgggcgagcctggcatcactgtcaaaacaatggcagttaaccgggtaccaagaagtgggaagccggctgagctgctgaagatgtttggtatcgacagggatgccattgcacaagctgtgaggggcctca

SEQ ID NO: 995 - DNA, 156 bp, homo sapiens
tccatttatttaagcccccataggtgcccttcacccccaaaaccagctgtacagaatctttgatacagacctatttgctaggggtgctgccggggatttggggtcagcatctggccccctatctcctgaccagctgagtcatgaggccggtttctc

SEQ ID NO: 996 - DNA, 464 bp, homo sapiens
tctgcagtggtgctgaaacgaccggagatactgacagatgagagcctcagcagcttggcagtctcatgtccccttacctcacttgtctctagccgcagcttccaaaccagcgccatttcaagggacatcgacacagcagccaagttcattggagctggggctgccacagttggggtggctggttctggggctgggattggaactgtgtttgggagcctcatcattggttatgccaggaacccttctctgaagcaacagctcttctcctacgccattctgggctttgccctctcggaggccatggggctcttttgtctgatggtagcctttctcatcctctttgccatgtgaaggagccgtctccacctcccatagttctcccgcgtctggttggccccgtgtgttccttttcctatacctccccaggcagcctggggaacgtggttggctcagggtttgacaga

SEQ ID NO: 997 - DNA, 344 bp, homo sapiens
cacaggcactggcctgtgaccttcgcaggggtcccggcccctcccaccactctagcctttctcaggctgcaccaaagattccatcatcagggccaactgagagtgagggagtctcacccaccgcttaccccagccctcccctgggagcagagagagaaaccctcttcatggaccagactctgcacccggtgagtgaggacagtcccagctgagtcccatcgatgttgaatctcatgccactgcaagtgccattcaccactgcgtcctgggctttacgagaccatgcaagacgggggttagtgaggaaggaggatttggggtgggggtggggtgattgaatattt

SEQ ID NO: 998 - DNA, 166 bp, homo sapiens
gatgaaggatggtgtgcccttgccccttccccccagccctgtgctgatcctccctgagatagggcctcaggaccagggaacctacagctgtgtggccacccattccagccacgggccccaggaaagccgtgctgtcagcatcagcatcatcgaaccaggcgaggag

SEQ ID NO: 999 - DNA, 514 bp, homo sapiens
ggctgggattggtgaagtcctgggcaagaagctggaggaaaggggttttgacaaggcctatgttgtccttggccagtttctggtgctaaagaaagatgaagacctcttccgggaatggctgaaagacacttgtggcgccaacgccaagcagtcccgggactgcttcggatgccttcgagagtggtgcgacccttcttgtgatgctctctgggaactctcaatccccagcctcatccagagtttgcagccgagtagggactcctcccctgtcctctacgaaggaaaagattgctattgtcgtactcacctccgacgtactccggggtcttttgggagttttctcccctaaccatttcaacttttttttggattctcactcttgcatgcctcccccgtcctttttcccttgccagttccctggtgacagttaccagctttcctgaatggattcccggccccatccctcacccccaccctcactttcaatccgtttgataccatttggctccttttt

SEQ ID NO: 1000 - DNA, 503 bp, homo sapiens
cagggacacgtggggtgtgctgctgctgctccccagcccaccagtgcctggccagcctgcccccttccctggacagggctgtggagatggctccggcggcttggggaaagccaaattgccaaaactcaagtcacctcagtaccatccaggaggctgggtattgtcctgcctctgccttttctgtctcagcgggcagtgcccagagcccacacccccccaagagccctcgatggacagcctcacccaccccacctgggcccagccaggagccccgcctggccatcagtatttattgcctccgtccgtgccgtccctgggccactggcctggcgcctgttcccccaggctctcagtgccaccacccccggcaggccttccctgacccagccaggaacaaacaagggaccaagtgcacacattgctgagagccgtctcctgtgcctcccccgccccatccccggtcttcgtgttgtgtctgccaggctcaggcagaggcgcctgtc

SEQ ID NO: 1001 - DNA, 501 bp, homo sapiens
  misc_feature (195)..(195): n is a, c, g, or t
  misc_feature (210)..(210): n is a, c, g, or t
gaatccactacagactacatctcagtcttcaaaacaaccaccaccatcaattaggctgccttcagctcaaacacctaatggcacagattatgtagcctcaggaaaatccatccagaccccacagtcacatggcactctgacagctgaattatgggataacaaggtggccccaccagctgtgctgaatgatatctnctaagaaattaggtncccattagtccaccacagccaccttcagtcagtgcatggaataagcccttaacatcgtttggatcagctccttcatcagagggagcgaagaatggtcaagaaagtggactcgaaattggaactgacacaattcagtttggtgctccagcctcaaatggaaatgaaaatgaagttgttcctgtgctttcggaaaaatctgctgacaaaatacctgaacctaaagaacagcggcagaagcagccacgagcaggacctatcaaagcccagaagcttccagatttgagtccagta

SEQ ID NO: 1002 - DNA, 382 bp, homo sapiens
  misc_feature (290)..(290): n is a, c, g, or t
tggccttcacgatgacaggctgctttgggagctttccctttcccagaactttgtagtagcccgatcgcaccacatcaatgatgggagcagccccagtcttgtttttagcagcattcacccgtgtctgttcactgaccaaagtccacaatttgtcaaggttgacagttgggcagaagctctggttcctctttaagtggtaatgcttcataccaactttcccaaagtagcctgggtggtatttgtcgaagttgatccggtggtgatgcagaccaccagcattaccgcggccngccggggtgcttccggtgcttgcctatgcggccgtggccgtggctcacgtggcccctaagtttccgggtcttcctcagtctggatggcatgt

SEQ ID NO: 1003 - DNA, 485 bp, homo sapiens
  misc_feature (409)..(409): n is a, c, g, or t
  misc_feature (435)..(435): n is a, c, g, or t
gaaggtcacctccatataagagtgtattggtcatggcatcttcaatgtcctttgtcttaaatgaaaatgcttgtaaagccatgtataaatcctgcaattttttggcagtaagtcttccagaaatcattcctttgtcattattttgctttttatgctcattgatcactccaataattctttgctctagtttgttattaattaccactttcaaaatagatttatccagatttgcaggaccactagaatcatttgtagaattaaaactataaatttttggaccttgcttgacacggggctccctggagccggcagcggcagcggcagcggtggccggcctggacactggcttcttgctttgggcctccccggcaattccagcctcggcagatttggctctggaagcagacancggcggcccggaccaccgcggccgcnggagccttgtgtttcttgttcttgccgcccatgttgcagctgtggcagaa

SEQ ID NO: 1004 - DNA, 65 bp, homo sapiens
aattaacccatttattataggccagtgatgtctcaaagagtagaggagcgtctactggtctttca

SEQ ID NO: 1005 - DNA, 194 bp, homo sapiens
  misc_feature (87)..(87): n is a, c, g, or t
  misc_feature (148)..(148): n is a, c, g, or t
ccatgaggcttgtccagacgcagtgaaccagtcgcagctgataacacacagaccattcccgatcccagaggtgcatttcaggattcnttctatttcatcagagacggggtcttcctgtgttgcccaggctggtctcgaactcctgggnctgaagcaatcttcctgccttggcctcccagagggttggaattgca

SEQ ID NO: 1006 - DNA, 126 bp, homo sapiens
ggtctcagtctttaatcgtggcagggcctcacgcacgcgcgcacgtacacacactcaggcttcagatcttgttgaaagctgcgatatcgacactctgcacgtgctcctcaaacttggtgatctcct

SEQ ID NO: 1007 - DNA, 319 bp, homo sapiens
aagttgagccaaactctttgtgtatatagcatcttaaatatattatcacctttgatgtaagtacctatgtattgtatggtcaccagattaaaaagtatatttttgtggattgccgccaatctggggggaaaaggcgaggtcctttattaagtattcactgtttaatatttactattttgttaaatatactgtactttggattttaattattagcccagttttttcagaggattgtataaaggggtttctcccctcactggtggtgaatgtgtgatgttacattgtaatctttgtgctgtatgggttgagcatcattata

SEQ ID NO: 1008 - DNA, 210 bp, homo sapiens
gactaattcattaatggtggcttcaagcttttccttattggctccagaaaattcacccaccttttgtcccttcttaaaaaactggaatgttggcatgcatttgacttcacactctgaagcaacatcatgaaagaaaggcttgatcattttgcaaggcccacaccacgtggctgagaagtcaactactacaagtttatcacctgcagcgtc

SEQ ID NO: 1009 - DNA, 537 bp, homo sapiens
tattgtaaagacgtcaattttcccaaaactgattgatagctataataaattcccaaactatcaagtgcatcattgttgttggaattgacaagctgattttaaaacttatatgggagaaaaaccttacatgaaaatacaaagagccagaatagtcaagacactctcaaagaagaaaaataaggtggaaaagacttactttatcagatctcaatacatgattgataataatgaagacagcttgatattggcacaagaacagacagactaatggaacagaggaaagaatccaacaacagatttacatatgtcatatgtggacatatgacagaggtggcattgcagatgggcgcagaaagttagattacaaacaatgataggacaggtgtgtaaccctatggagagaaaaaaatgaaagtgaatccttacctcacaccatatgcaaaaaaaccaaatctaggtgaattaaaggcctaaatatgaaatttacatttataaggatttcagaatataatctaagagactatcttcatgaccttg

SEQ ID NO: 1010 - DNA, 360 bp, homo sapiens
  misc_feature (99)..(99): n is a, c, g, or t
  misc_feature (101)..(102): n is a, c, g, or t
  misc_feature (146)..(146): n is a, c, g, or t
  misc_feature (153)..(153): n is a, c, g, or t
  misc_feature (175)..(175): n is a, c, g, or t
  misc_feature (187)..(187): n is a, c, g, or t
  misc_feature (219)..(219): n is a, c, g, or t
ctggcacataggcactgaaacactgcatgttaatccacaccccaccccacctatgagtgtagtcaaagctggtaagtgacaagggctttcgtggaaacntnncctgacctaatgttgggcatcaggttacccaaagagcttcaggnaaatgangaaaggacttgcaggtcttgantgagaatggagnggtaactgccaatgagggctttggctttagcngaaagtctgaaagggaagccataggaacttaaacgtaccgactataaagctctgagaaaagctgatgttttagaaagaccatacattctaggtacaaatacctaaaaactaaaaaataagtacgttggccaggcgggcgga

SEQ ID NO: 1011 - DNA, 434 bp, homo sapiens
cctttccccaaggtagcacatctggctcactccccactccgtctctggagcccaccagggaaggccctcatcccctgccgctacttctctggggaatgtgggttccatccaggattgggggcctctctgctcacccactctgcacccaggatcctagtcccctgccctctggcacagctgcttcctgcaagaaagcaagtctttggtctccctgagaagccatgtccctcgtgctgtctcttgcctgtcccacctgtgccctgccctccagcttgtatttaagtccctgggctgcccccttggggtgccccccgctcccaggttcccctctggtgtcatgtcaggcattttgcaaggaaaagccacttggggaaagatggaaaaggacaaaaaaaattaataaatttccattggccctcgggtgagctgagggt

SEQ ID NO: 1012 - DNA, 163 bp, homo sapiens
acagttccaatcagtgtgtctggttcatttcagttccttcactgccaaaccggggggcagggactgcttcagtttctctgccttctctttgtcagtgatgaccagggtgtaaaggtatctgctgcatcgaactttaaacttcacgttgtccttatttttcttg

SEQ ID NO: 1013 - DNA, 366 bp, homo sapiens
gaagatgagtccatgttctcgtgcaaaagcttcaccttcttctttttttacttctcttctagattctaaatcacttttatttccaataagcataatgaccatgttggaattggaatgctggcgggcatcttctaaccaggttgtcaagtggttgaatgtatctctccgtgtaatatcgtaaactagtaaagctcctgctgcacctctgtaatacgaccttgtgatggaacgaaaggattcttgccctgccgtatcccatatctgaagttttatctgtttcccatcaatagttatcattcgagcaccgaactctacaccaatagtaaggtcatgcactggctgaaacctcttgtctgtaaactgtag

SEQ ID NO: 1014 - DNA, 470 bp, homo sapiens
ctagtcacatttactcttaagaaatgaaaggttttccaggagagaactgtgtacaaataaggtgactggagatgtgacctgatgtgtcacgaggcccttcggggcggcaggcgctatcgtgggcgtggtccttgcaccgtcccatcggccttgccttccagctccgtggcacggtttcctggtctttgggccagtgtgtaccttggagtgacttcctttctcaacttccactgcagtgtgtgtgccttctgctctgagagctgccttgtgacccgtgtgatagaaagcagggagtgagggtccccgcggacctggcccttccctccttcctcccccagaaagaggagttagagcaggggtgcgagagccgttcgctgtgggtttgtctttgaacaaacattaaggtgtcttgtttttgttctgggctgggggttggctgtagtcttaggtaactgaaagttcctactctc

SEQ ID NO: 1015 - DNA, 476 bp, homo sapiens
agcattcgttttttacctgtttgtggatgtgtgtttgtatgtgcatacgtatgagataggcacatgcatcttctgtatggacaaaggtggggtacctacaggagagcaaaggttaattttgtgcttttagtaaaaacatttaaatacaaagttctttattgggtggaattatatttgatgcaaatatttgatcacttaaaacttttaaaacttctaggtaatttgccacgctttttgactgctcaccaataccctgtaaaaatacgtaattcttcctgtttgtgtaataagatattcatatttgtagttgcattaataatagttatttcttagtccatcagatgttcccgtgtgcctcttttatgccaaattgattgtcatatttcatgttgggaccaagtagtttgcccatggcaaacctaaatttatgacctgctgaggcctctcagaaaactgagcatactagcaagacagct

SEQ ID NO: 1016 - DNA, 396 bp, homo sapiens
  misc_feature (351)..(351): n is a, c, g, or t
aagagtttcttttcctgcaattgagacagcactggtatgacttggttttctgtttgcaccacttccattggttatacaggacatgggaataactgctcgagggcttggttggcctttacttgagactgattttttcactgaggccacatgatcttcagagattgcaagacgcctcaaaacatcagccaaagccgcctttagcacagtgatttcatcttcttgttgctgaactcgtgactcaagagctgacaggcgatcttgaacatcagaagtacttgcagcagaaatactatcatcgagactgccggcgaaaccgtccatcttgcggggaaagcgccgggctccgggctnagaggggcgggcacttcattcagcggaccgacagagtggccgacg

SEQ ID NO: 1017 - DNA, 535 bp, homo sapiens
gatacagatcacataaggccttttgttttttacaccattcccattgagacaagtacaatactttgtagcaaatacatgattttaaaaaacaaaaccaaacaaaaacacctcagtcagagatgcctcagccttcattgagggctgaccatgcactaatcaggttggagcctcaaaaaacccacgatgtgtttttaaaaaaaagtctggaaattaagcaaacattcctaacaccagctagacgatgttccggttaaagcccctaaaatacaaagaaataattgttatactttctttacatacaggtcttcacttttgctgcgaaacagaattttgggcacacagccagactactaacacatttcaataccattaatatgttttgttttttctcagaaactcaaaatatttgttaattcaacatatataaagatcatttaacatgtgaaaatacaagtaccagaaaaataagctggcagcagcactattccaaattttcaaacaagttttatttccatacaattctgacatttccgtt

SEQ ID NO: 1018 - DNA, 136 bp, homo sapiens
tctactcattcaaaaggtcataactcaggagtgctgtttataccagatgaatctacaaagccaagaacaggaatcaccgtatctccttcagtagacctgatactgtgagtcttctcttttctgttgacatatttgt

SEQ ID NO: 1019 - DNA, 294 bp, homo sapiens
gaattatgctttgtcaagccaactataaggcagctttctacaacagttctgcaaaatgtttccaccacattgagcaaagctgacactagacactagctacacgtgggaataggaagatgggccaggctcagagccgccgcaaaggatgaagtccactcagatttgaggcaatcctggggcaaagcactgagcaaagcaacttctctggtaatctcctcctcagccattctctacccaggatttcagaacacagaacagaagaaactgcaaaagccctgcaggatatatcacagc

SEQ ID NO: 1020 - DNA, 368 bp, homo sapiens
gctatttctttgtggttgggtaattggggattttggttttgtttgtaaatattctggaataatacttgcattgttctggtacttattctgagaaatgaatttttatgaaaagttctttccttccatgttttttacatacttactactgttttgtctcttcacactgaaaaacagtaagtagattcaaaaattttattgccttctataaactttccaataaatacaacctatagtcttaactcagaatttatgtagcattctgaagcacatttacattaagctttggttaactggctattatagttctcattatgacagacaattcagaggatttttaaaatctttgtttttacaactctattatggtt

SEQ ID NO: 1021 - DNA, 183 bp, homo sapiens
  misc_feature (53)..(53): n is a, c, g, or t
  misc_feature (63)..(63): n is a, c, g, or t
  misc_feature (65)..(65): n is a, c, g, or t
  misc_feature (71)..(71): n is a, c, g, or t
  misc_feature (82)..(82): n is a, c, g, or t
  misc_feature (116)..(116): n is a, c, g, or t
  misc_feature (125)..(125): n is a, c, g, or t
  misc_feature (137)..(137): n is a, c, g, or t
  misc_feature (140)..(140): n is a, c, g, or t
  misc_feature (147)..(147): n is a, c, g, or t
  misc_feature (151)..(151): n is a, c, g, or t
tggaaaaagtcagggaggccagggggtgggcttgaaaccagcttgggggggtntcgatccctncntttttngtctaaatttnatgtatacgggttcttcgaatgtgtggtaggggnggggggcantccatatagtcnacnccaggtnttantgggagggttcttctactattaggacttttcg

SEQ ID NO: 1022 - DNA, 349 bp, homo sapiens
cctctgacttcaacagcgacacccactcctccacctttgacgctggggctggcattgccctcaacgaccactttgtcaagctcatttcctggtatgacaacgaatttggctacagcaacagggtggtggacctcatggcccacatggcctccaaggagtaagacccctggaccaccagccccagcaagagcacaagaggaagagagagaccctcactgctggggagtccctgccacactcagtcccccaccacactgaatctcccctcctcacagttgccatgtagaccccttgaagaggggaggggcctagggagccgcaccttgtcatgtaccatcaataaagtacc

What is claimed is:

1. A method of identifying a patient with clinically isolated syndrome (CIS) at high risk of developing multiple sclerosis (MS), said method comprising:
detecting the level of expression of a marker gene within said patient, wherein said marker gene is a marker gene set forth in Table 18, Table 19, Table 1A, Table 2, Table 4, Table 8, or Table 13, or said marker gene comprises a nucleic acid of at least 10 nucleotides in length and at least 90% identity with a contiguous portion of one of SEQ ID NO:1 to SEQ ID NO:1021; and
comparing the level of expression of said marker gene to a standard control whereby a differential expression of said marker gene relative to said standard control indicates that said patient is at high risk of developing multiple sclerosis.

2. The method of claim 1, wherein said marker gene is a marker gene set forth in Table 18.

3. The method of claim 1, wherein said marker gene is a marker gene set forth in Table 19.

4. The method of claim 1, wherein said patient at high risk of developing MS is a patient with CIS that will develop MS within two years of being initially diagnosed with CIS.

5. The method of claim 1, wherein said marker gene is ZNF12 (SEQ ID NO:83), C17orf65 (SEQ ID NO:977), BAT1 (SEQ ID NO:981), ARHGDIA (SEQ ID NO:1000), NAPA (SEQ ID NO:995), ATP5G2 (SEQ ID NO:996), DDX52 (SEQ ID NO:292), NDFIP1 (SEQ ID NO:2), SDAD1 (SEQ ID NO:116), USP7 (SEQ ID NO:1014), MEF2A (SEQ ID NO:1007), AGER (SEQ ID NO:998), RAB1B (SEQ ID NO:1011), GDI1 (SEQ ID NO:986) or BANF1(SEQ ID NO:999).

6. The method of claim 1, wherein said marker gene is ZNF12 (SEQ ID NO:83), C17orf65 (SEQ ID NO:997), BAT1 (SEQ ID NO:981), ARHGDIA (SEQ ID NO:1000), NAPA (SEQ ID NO:995), ATP5G2 (SEQ ID NO:996), DDX52 (SEQ ID NO:292), NDFIP1 (SEQ ID NO:2) or SDAD1 (SEQ ID NO:116).

7. The method of claim 1, wherein said marker gene is USP7 (SEQ ID NO:1014), MEF2A (SEQ ID NO:1007), AGER (SEQ ID NO:998), RAB1B (SEQ ID NO:1011), GDI1 (SEQ ID NO:986) or BANF1 (SEQ ID NO:999).

8. The method of claim 1, wherein said marker gene is C17orf65 (SEQ ID NO:977), C4orf10 (SEQ ID NO:1005), FAM98A (SEQ ID NO:1020), TLE1 (SEQ ID NO:844), INHBC (SEQ ID NO:993), NAPA (SEQ ID NO:995), TKT (SEQ ID NO:994), TPT1 (SEQ ID NO:138), F1120054 (SEQ ID NO:11), KIAA0794 (SEQ ID NO:104), LOC134492 (SEQ ID NO:184), or MGC34648 (SEQ ID NO:348).

9. The method of claim 1, wherein said marker gene is CD1D (SEQ ID NO:376), CD44 (SEQ ID NO:275), CDC34 (SEQ ID NO:553), CDKN1C (SEQ ID NO:320), CD47 (SEQ ID NO:1015), GZMM (SEQ ID NO:617), or PPIA (SEQ ID NO:1010).

10. The method of claim 1, wherein said marker gene comprises a nucleic acid sequence at least 10 nucleotides in length having at least 90% identity with a contiguous portion a nucleic acid having the sequence of one of SEQ ID NO:1 to SEQ ID NO:1021.

11. The method of claim 1, wherein said standard control is a detected level of expression of a standard control gene in said patient.

12. The method of claim 1, wherein said standard control gene is GAPDH, 18s ribosomal subunit, beta actin (ACTB), PPP1CA, beta 2 microglobulin (B2M), HPRT1, RPS13, RPL27, RPS20 or OAZ1.

13. The method of claim 1, wherein said standard control gene is GAPDH.

14. The method of claim 1, wherein the elevated level of expression of said marker gene or the lowered level of expression of said marker gene is determined by the ratio of the level of expression of said marker gene to the level of expression of said standard control gene, whereby said ratio being approximately equal to the corresponding ratio set forth in Table 1A or Table 2 predicts development of MS within two years of being initially diagnosed with CIS.

15. The method of claim 1, wherein the elevated level of expression of said marker gene or the lowered level of expression of said marker gene is determined by a threshold expression level resulting from a statistical model.

16. The method of claim 15, wherein said statistical model is obtained using a classifier algorithm selected from a compound covariate predictor, a diagonal linear discriminant analysis, and a support vector machine.

17. A kit for use in identifying a patient with clinically isolated syndrome (CIS) at high risk of developing multiple sclerosis (MS), said kit comprising;
(i) a nucleic acid sequence having at least 90%, 91%, 92%, 93%, 94%, 95%, 96%, 97%, 98%, 99%, or 100% identity over at least a 10 nucleotide continuous region with one or more nucleic acids having SEQ ID NO:1 to SEQ ID NO:1021, or a nucleic acid complimentary thereto; and
(ii) an electronic device or computer software capable of comparing a marker gene expression level from said patient to a standard control thereby indicating whether said patient is at high risk of developing MS.
